United States Patent Application Publication US 2026/0058010 A1 - sequence listing, part 5

SEQ ID NO: 46 - DNA, 1146719 bp, Homo sapiens
  source 1..1146719: mol_type = genomic DNA
gaacgtgggcagcctctagaagctggaaaaagcaaggaaacacagcctcctgtagagcttccagaaagaaatgcagccctgctgacactgggttttagcccagcgagacctgtgtcagacttttgacctatagaactgtaagataatacatttgtgctgttttaagccacgagggtagtagttatttgcagtggcagtgatagaaaaccatacaagaccctttctggcaactttacactctctaagaataaaagctagcttagctaacagctggcagccccatctgggagaatgcttgggaggaggcatcacaggggtgctctgtcccagctgccttctacagtccccaggactgccagctcctggccatgcttgggcgtgagcatcccactgggcaggggaggcagtgctgttatggcactttgagtctcaggagatcatctggtcctgcatcttcccttcacacaggtaaggtattatcttcatccaaaaattgagggagctgtgcccagagatgtgcatggtctcacccactgtcacacagctactgagagaagaacgctgtggggccagggctcataactcctggtgggagactcttccatttgtcacactgggcaagtaacttttccttgtgttagcgggtcatgaaggagagacagacagatagggaggttggatggcagaacaggactggaaccctgaacccctggtctagccagtgctttctgagcacctgtgcttgaggggaaaggtacagccacattaggcctttcttcactgcttgaggagagactttgaggggggagtggtgggggccgggagggaaagtgaaagattaggctaaaggaactgctgctatggaaccagcatggtgctaaggatgaggattctgcctgatcaggaagttctctctcacacctggaggctgaaaagggcatgccctgtgtccgtaacaccaaaaggcacctcccaacctctcattccacctctaagaactcatggggagcaaggcagagtgccagtgtggcttctggggggacaaggcaggtcagtttgctgggggtggggaggccaggaaggctcgtgtgtgggagggaggccatgctggggcctgtgtccagcccaaattcaccgatggggtcaggaggggtcagggtagcagacagatcacagggggacacaaaggccttcttgatagtttccatgtctgagcagcattctccaggccacgtgcctgtgggtccagggcagcctccttcagaacgcgggctgtgactcatcagtgggacttgaagacatttacaaagttgtgagcaatctttaaaaaattttagaataaacatatagagtatgcacattttgtaaaagtaagtgttgttgcgtaaaactttacatatacacagtctgcagttttgacctggcaggtccgaccctttcctaggccccggagggagagagactcggatgtggagaaaaggcagaaataactcagccatttccacaagaccagcttttaatatgactgtgatttgaagcacgaataaataaatgccaaagaaaatggaaaaaccaaagcaaacctcagaacatcaaaactaaaataaaaaagcataaaatgaagcaaaacaaaacaaatctccatcggacaaacataaaagcccccctaccccagataaaaagaatcagactgtacaagctgtgtcacagggagagaagaacgacatgggcaccatgggtgaacacaggcgtcccccacccgctggctgctgtgccgccgtcataggcactgggggggagggaggttggcgcgggtcacctttggcgccgaagccccatgggcagcttggggaaaagggggtttttgggcaggttaagaactttcacaaacgacacaagaactgaatgtagcagagagtcccatgggttccctcttgattgtgcagttctgattccagggtggcctcatggtgactttggacctggaatctggtcccactgcacgggcagcagtgtggacactggaaaccgcgtggaggagtgtcatgtacaagacagacgtggaggtggcgccacaagaagtctgagcatgcaggtgctttatacatctggcagtgagatgtgatggcaggttcgttcttggacagttccagagtgtgactcatctctcctaagagggacgcacggcggggcccaaggatgcgtcgtgttggacgtggccggagcgaggtctaggcagctagtctgcaatgtgtgcatagggggctcttgcttctttccagcactggggccatcccacctgagcttgctgttccttgtcctgggtcttgggcctcaaggtctgtttggagggagtgctgggtgactcgaggggtgtcagcaggcaatctcctccaaggtccccagggtcgtctgcaggggcacgttcacagtgtgactgatggtttcagagtggtttggcattgtgtcacaagtactctggaagggaagggttggtgggagtttattattcgctcagcaaaaattcttcatgatgccaccagcggcccagcctaggccctggggaaggtgctccccacttgtgggctgcttctgctccagacatctgataggctagtttaccatcttgggggcatgaggctgaatggaatccttaccattgcacacctgggtgccccctatggcagtgagaaggctccctggtttgattggctgctggtttgatccctcttagaggtgcccctcatgtaactggacctatatctgagtggtctgtagctttggggctggatggtctgagtcctgacctctctcttgggggcctccctcggggctatggtgcaggaagtgcagcccatggctaagcctggggcagggaggacccatggctgaggccaagcagaaacggtagaaggccttagagctcagagccagagctggtcagagctgccccaaggacttttagggttaagctggacccagggcaatgtagttgtgggtccctaagcggggaggggctgagctggccgcacatgaatcttcagggtggttcccaggctgtggtgggtgggaggctgggagggatgggagcagggcaccgctagccaggaggctgtgccaggaatttggggaagatttgatagggccacaactaggggaggagaaacagggtggagaagaggctgtgacgctgagaccttctgaagcaaggagggctctgggggtgcaaagggaaccacttgctgagcacttactataaactaggtgctgtgctgactgctttgccggcaggatctcactgaactcggatgacagccccctgcagtctgatctgatgcagatgcttagacaggtttaatatgtaacttgcccccaggcacacagccaggaagccggagccttaggatccagccaggccagctgatgccagaccgtgggccccttccacactgccctccccttccccacttccgttccacagaggctgcaggggaccggagaatcaaagcaagatttgtagacagtgtgtggaacagaaatggaatccatatagggagaaggggctgggatccattttggatttgttgatattaagtgggtggtggtcactcaatgggcaccgttttccagggctggaggtgctgatttggggcccaaggctggatggggaaagctggcgacacctgcacccatcagcgaaggcctgagcccaggagtagactgagttttggaagcagaatgaccaacagccacagaggggctgccctcgggctataggaaagagaggcagagtagggcagtggttagaagtgcttggagggcagctctgacactcagcagctgtgggactttggtctctgggcctcaactgcctcaaatacaaagtgcctgacagtgcctgacacgtaccaggcatacaatagtcagtagctataatgggcactattgctactaccaacttcatggggctccatactctatccctttcgaatgggatggagggccaatgatgctttgcttgtactttgccaccactggggaataagggagtagatgtacagagcctgtccagttctccccctgctgtgagatgggggaagcagctgtctgcctgggagaagctggattgggccaggcagttcctatgtttggaagcacctcctggtgtctgctgcatccgtactggcttctggcatgactctcagagagaggctcgaggctcagctggagtgtccttggatttgggaactgacagcatgtcccaagccatggaaaggtgtgcagtgagtcacatctttcctgcccggccccagcatctggttttgtactgccggtacaagccagagcagcagaacaacttccaatcagtgagctgctcttaccacattctcatcgtggctcccttcgtcctcctctttgccaagcaggtctaatagcttctctttgatcagctgcaagaaaagcaggaaggggttggtcaggccgggaagagggtgcagaggcagaagggacctccctccattgggccccactggggtggcagctgcttgggctgtggctgaacataccgtagcacaagcccagcctggcagccagctccaggtgcctgtctgtctcaacccagccttttggctgaaatgggattttgttgcaggagatggagctaggaataggtaatggaaggccctgcttcacagggtgaactgctgtctttgtggctggcgagtgttagtaagtggtgtgtgctggtatgctggctccctgtctgtcctcaggagcagccttgggaccccctttctgtggctggggctgggggacaagattattattcacttgctaggcctgacactgcacacaattcagaagaccaggacatgcctgagttcataacattttactcctagcaatagagggtagttcttaaatctgttacctggtgtgattcaattgccataactgtgtacagttttccacaaaagtcaataaacaaagcagaataaaatctggccatgggaactgatgtggttttggggtcactgtgctgagacgcatgagattctccagaggagcctggttactggggcacgacaggtccctactgtggttccgagcagcctttggtcatgaacagccccctccgagagacagaacatggttctgcaggctcccgtctactgctcctgtttgggggacttcataggtccaggcattctttggaagttctggagccattgccattttcaggggcacacattggaggtgaagtgcattgcccatctcacagccagggggatggaggcctccaagggaacacccgtcaaaacagagcctgggatagtggcatccacaggctcgctgtcagagagagatgcaggtgagaaggctgaccccagctctgggaaccctcattgtcagagaaagctttcagaggcctcgttccagctgcctcttgagggagacatttccccagactgtcagcagccggggcggctggcgtgccctgctgtcttctcgctgaggattggtgaggactgctgggaagtgccccttccctaagactggctgggccacagaggacatgactcaggtgatgggccacctagagggcaggtgtgtgtgggtggagggagtgtgtgtgcaggtgtggacatgctcatggatgaagccaccacctccagcccagctgcaggaggggcttggagctggcctcagcacagtctggcccccttcccctcatccctccccatccttccctgccagtgtagatggcccagtgctgttccagctcccagaggataggcctgtgtttctcttacatccaccgccccccaaaaacctcccatccccttgccccacagagcctgggcttcagtgatcgactctattggtggacaggaggggaagcaggctctgcatggagagaggcaccgccttccctctactatgattctgaacctggggcacgatgagggcaccagcatgcggtcatttccctgtggggaatcccaaatcttacctcataaatataatcaaagagctctagtattgtaaggatactagcaccaatgaacaatcccatctgaccaccaatatcacctggagagagagggaaaagaccaaagctttgcttttatgcagcttccaggaagggtgaacagactgagatgcaacccagaccttctgaatggcgccccctccatggggagcctgggccttgttgtgggaggtccaggcctttggcagttccttccctcacggcacagctctgagagctaccatttttcagcattcagtggggtcggggactaagctgatggcttattggaagggcttagactagatctcatgacccacagggctaacggggttgtttggttacactcaaaaccacaccgattgggtcctgttttgactctgggctgggagtagggagaatagagagctaggatgtgtgtggactggtgacaggtgccctgggtgggagtctcgggaggagatgctcccctaacccaatcacggcatgggcttcagggccaccttagggcacctcccacccttgggataaggccataggtgtctcctctctcccccatccaaaagttagtgtgcaattttgactctttctagagctgaggttcttactctggggtttataggcccccattattcaaagttttctggatttgtcttcagatacccctgcatccaactctcctggaagaattgtaatcagtgttgctgcctggatacacctaggccaatagaatcagagcctctgcggttggggtctggatgtcgggatttttaagttcccgctgggggtaaggtgcattctcgggcccaccagagtttgagaaccactctcctgggaggacttcagatggctggagactctcctgaaattgaatgcaaaatgtatgtgtgcctgggcatttgtagcaggagagtccatagctattatcagtttttaacaggggttctgagtcctcaaaagcttaagatgctttgctgcagaggcagtgtggcagagccgagggctctgaggctctgagtccagagagtggccaccagctggttgtgtggctttcataagccctgaccttctcaggagctttgtctccaaaggatatttggtggtggtggcaggatggagggggttggatgagatgaactatgaagttctttccagccctaatctctaagactctcagtctctggaaagaggtttgggaattgggtttggggggcacagttgggggtggcaggacagttctcttggagatgccagcttgacctcttggcctgagaactctctggtaggcagatctgccccactccttctcagcttatggctgggtggggtccagcacccacatgcccgggtgaacaacagagatggtggggagaaggctcttcccagtggaacgcggtgctggcctcaaactggctctccctcattcctttcccatcaccgctccctctcatgtctttaatggaggcttcttggggactgtgttctaatggatatgtatgtcgggggaggtgtgtgatgtacgtgtgcagtgtgagtctgtagtggtatagtgtggggtatatgccagggtctggggtgtgtgcacgtatttgtataaaagcaggcaggaggtctggctgtctatggttttatgtaggtggctctccctgtctaggcaccctgagtgtgtctaagtgtgtgtgagtgtgggtctgtggaggtgagcagagtgtgtcgagcgtgtgtagtgtgggtgtgcttgtgtgtgtatatgggggtgtgtgggggctgtgtgcatggatgtgtctctagctgtgtgattggaacgtggggctgtagaggtgtgcatttgtgtgtgtggtcctggaccaccgtgggtgcatgaacctgtaggtttggtgcatgtgcgtgcagactggggtggggtatgctgtgggtagtgtgtgtagcgtgcacgtgcatggacaccaggaggtgagaaagggccgtgcggtgctgagagaagggcctgatgggacctgatggctgagggtttgcaagcggcacacgctctcatcacaggaggtccagatggcagcatgagctcctcagccggctattctggatgggaacacgatcgatgctgaacaaactcatcctcatatctgacgcagacatgacaaattcagagctcaggcccttcttgctctgtatgtctctctctctctctctctctctgtgaaagagagggatctgtgtgagagagagagagagagaaagaaagagacgcacatagagcagagagacagagaaagactgtgagcctatgctgggggagggcagggggtaggaagaggcctgtcctgggtcctctttatggaaataaagggcaaggccagcataggggtgagtgaggggtctatgtctctgctggggccaagggaatgagtctcttggctcagtacctttggccacaatgacttctgaggctgagtgacagccactttaacccagctgggaccgagctatggtggggagtccccagcctcctggagaaagtgtagaaatgcttagccagcccctggacacaccagctgagccctgggtccctggcatagtgattgtccaggtgccagaaactactatttatggaccttttctgggctagggggttatcatgtttaaccatcacaacaagctcataaagtgggttttattaaacccatcttgcagatgaagaacctgaggttcagcaaggtaaagctacttgcccatattctcatagctggtgtgagaagccaggtaggaggcacctgccccttccaaaatgctaacgtcacctggttcagctcagggagacaacagctatttctctttctggtttacaggcatcagatcctttcttgagagtgagtgggagctgagagaagggctctagagtcaagtcctttaactgtgcactctcaggggtcttgtgagttttgggttgggctgggttaggatggaaattagctgcctgtatccatcagatgccactggagccggggagctcatgcgaacttttgtggggtggcagcaggtttgtagatacctggggagagtggcccttcatttgtgtttgacaaatgactctcagtccagggggcaacacctggccttctggatgcagcaatgttgcttttggggtgaagttccatcagggccctcacctcccaggtcccacctttgaccacccacagttcagccttccctccttctctccttctgatacctctgccccctctccatggccccaggatcctgactgcaagctggggcagaagaccatgaattccaagagtgcagggttagaaaggcccagagagacctttaggctgaccgtcctcattgcatagatggggaaaatgaagccaagattggggaataaattgggcctgaaattccaccccactgctggggttctttccattctgggagaggagcagtgcaaggaaacagggagtaattattagtaaatcaaaaggttagactcctccgaggctatgtgtctgtctgcttgcctcccatccacctgtgcatcctccctccctcccaccctctatgagatgtggaaatttgtgcaatagacactgacttaccaagtaaggcagcaacttcatacgccttcttctgttcaattgtctcataattgagagcttcaaaaaatatatccagaacaaggatgttctctctgcagagagaatagtcagtaccatacatggttagagctatcagcattcacagggagcatctaatacagctttcccatggaaagatggagaaaaggaggcccaggaagtgaggcagcttgcccaaagttagagctggttagtggcagagctgcggcttcaagccaagaagcctgactcccagcccgggtctggaggcctacatcagttgcctccttttgttgcttatttctgtctccctgctttctctttgcaccctatgcaggagtcctgcctggcttccaggcctctgcgcctccaaagggcctgcctcgtcctcaacatgaaggtgagtttcattaatcttctgacaaggcttgtcttggctagggtgcctgctccagctgacctcatgggcagcccctgcccactcctgaggccccctaaattcccactggtatttataacaagctcctcctgttgggaggccctgctctggcattatcaagtcaattgccagaagtcaaagaaagtttgtagggagcaaacttacatctggctggggggtgttctggcagaagcaccgcggcttgctttgctcctttgggcaggtgtgtgagtgagacacatctcggcagtaaaagtcgttactgcctgcagactgtctgccaagcagcagggactggcatcccctacaattcctgtctcctccaatgtgcccacaattcctccagtgccccttgttctcaacccactgagcagaagctggcccaggatggggtctggggacagtgttggcaagaaggaggggctggcgaagagaggagcagattcttctttctgtgagcagggctcgcagggcagctgttcaaagtatcaccttctcttgcttggcttgccacagctgtttcctaacagttcccttcttcccatctgcctttcccccgtcttctctatcgccgcctgaaggatctttctaaaactgctaacttgattcaaattaaataaaattacagttccactccccagtcacaggctgcatttcaaatgctcgttggccacatgtggctagcagctaccccgctgggcattgcggacacagaacatttccatcatcacacagcattcgtcctattggggagcagtgggcaaaaatgcaaatttgagtctgtcactcacctctgaaagctcttcaggggatccctagtctgttaggataaagcccaccccctgcacccactcggctcagcctacaagaccctcttgctctgacatatccatgttcccctttgaagttttctcttctgccctgtgctgatggtctctgctgagcttctgcctaggacacccacttctcccatgcttccattcatttattctgttaaaacacatttttttgagtaccaactctgtgccatatgctccactagaacttggcagacaacagagaacaaaaaagatagtttcctgccctcaggggctttcagtctagtggggcagacaggtaacaaacaaggaaacacaacatgaatatgtaattacacactgtggtgttataaaggaaaacaccagaggactttgagagaaaaataacaggagagcacctcatctagatgcctgggataacctcaattttatttttatttttattttttatttgttttagagacagggtctaactacgttacccaggctgagcttgaactcctggcctgaagcaatcctcctgccttggcctcccaaagcattgggattacaggcatgagccaccatgtctggctggagatgacatttaaatggagacctgcttaaggaggaaccagttaggtggaggctgggaggaaaagaattctaggcagagggaatagaacgtgcaaggtctgcctggaaaactatacatcctttaaaaaaatctctgggccaggcgcggtggctcacacctgtaatcccagcactttaggaggccgaggtgggtggatcatgaggtcaggagatcgagaccattctggctaacacacggtgaaaccctgtctctactaaaaatacaaaaaaattagctgggcatggtggcgggcgcctgtagttccagctgctcgtgaagctgaggcaggagaatggtttgaacccaggagatggaccttgcagtgagccgagatcatgccactgcactccagcctgggcaacagggcgaggctccatctcaaaaaaaaaaaaaagaaaaaaaaattctctgaagctttccctgatgtcacctcattgcaagctgcagctaacccatcattctctccttccctatgcatccccctatgatagccaaagtcaccctatataccattcagtgtgtgcttgtctctccataagactgcaagctccttaagggcaggggctgtgtcttactcatctttgtctttgtattctgaacatggagcgcagagcgtgacacacagagggtgttcaactaatgtttgctaacttgaaccaaatgcttatctttgctttcctccttgattgcctccaatttcctccttatccagttcccccttccccctgcctaccatgcccactaaacttacgagatatatttttctgatttgttaaatttcttctcaaggtacttggctgatgtcttgctggggatcttcaccatggagagctctttgttgtagcgggttaggttgcagggtgtcctgcagagacagtaattgctgtccttttccgccaacagacctggaggggagagtgaggtggggcttagtcaggtgtgggcactgggatttctaagggtccagagtagctggattgtagcagctgagaaatgagctgggaaggggcactggtctggggaaagtgaggggcagggattgtggagagaggggaactgggcttttgctgtaggttgatcttgttttccttctgcttcttttaactgtcatgtcactctttaaaaattgttgaaatgggaccacttttgcagaggtctccaagagagtcctggtgtcctcagcttctcatggctttcttccctgctcccagcctcagtattctcatccacagagaatgatccaccatcaaagcaaatgtaggagaccattttatctgaaacccagggctctgtgctcttcctgctggggctccctcatagccagtgccccaccttctctgcctggtgggttaggatgcaggcaaagttccttcatttctttccctggaggcaactccctgcatctggaacccttcctgccctctcctctcttcttccaattagacataaagtttaaggcatcatttccctctgacaaagactttctccctgatcaaacttagccaggctcttcagaaccctgttctcaactaggccttgaccttggcccccatccatgctgggcgggcctagcccagttttagcaagaatcctgctaaagtcagtttagagagaatcccccacccttgatatctgatcaccctggcctgcctttgcagatttccccctaactttgatgttttctctgggtaattttccatctactgagtcctcgctctgcttgatggctatgaatctccagctgtcttggctgaattctcagttgagtcccatctgtttcccctgttgtgatactcttgacacctgttgcaattgccctgaataaagacttccttaccattttaactagtgtcagagtgattttttctttaacacctccctccctttttcctctagccacctcagtgtttccagctaccctgggttttgctgagtctttgcacacatcagaagtcactccctctcctctcagcctgccctccctctctagtcctcctggaggtatctggacctgaggccagcactgcctcacttagctccagcaagtgcagatgctgaacgaacttgagggcacattgtttaaaaagtctgcttgtcttgattataagccatttcctgggtccagagagaggcaagcatgcagagtgggcctagctttggggctgcagcttgtttgtgcactctccctccctcctagttttccagctggggaaccagcagaggtcttctaactggcagaccccccgcaggcccctcaggcaggaggaagaagtgtgctttgtgttttccatttgcatgcatggaatgcaaacctgactttacctctccagccctcctccacctcccctaggctcaatggagcagaagaaagatggtacttcagaatcaccttggcctccccatgtagacaccatcagagtgtgtgaggggaggtattgccaagctcctctgatgcctacctggctgcccactgtctatcctctctccacctctgtcctctcccctgcattccttagcaccctctgtttcccctgaaacccactccttctccatctccaccttccatatctctttctctccccagtcccatttccagccctcatcctcttgcaccagttcccttcccaaccttctcttcttcctcctctccatctccctctcccatccctgcagcaactccacccgaccagcccctttcttctcatcctctctccattccttcttccacttgatctttccccaaacccagatgatttccatgatctcagtctcaggcccccggcccccatgattccatctgtcccctgagtactgacctagggcaggctctgcacactccttgtgctgctcaggggtacaaaaaggggcatcccctgcaaagaagaaacaccagacagagttactcaggcaggaacattcatgtcagcaacacctcctctgctttgggcttagggaaaggggtgcctcctggcagttgaaggggcagcggcctgccagtgggcagttcgaagggagccttggatcacagtgcaccccagagctggaaggctggcttctgatctgctatgtaagcttgggcaggctgttcacctcgttgagcaggagacagtaggatctgtatggctaacttctcccatgtttctgtgtaggtccagccagctcccgtgggtgacaggtgggctcaccttgaggattgagactagggaggtggtggtaagcaccttgtaagcctggctatacatcatcttctttaacccatacaggcaccctttgaagtcagaagtactgtgtctgttttacccatgataattttgaggcttaagcatcctgccttcccaggacaccaaggctagtagtgatggaagtgggctttgaacagaggtcagtctgatccagagcctggagctcttctcagcacaaccacactgctgtatgggaacaagggttgttttgtgtttcttcattgctttgttcataattccacattagtaactgagatgtcagtattagtgtcatgggtgtgattgacacctctactgcttgcctttggctaagggttggtggggaaaacctcactggctggtggcctagtctgagcatcaggtgagtaatattccccagtactggattctccttgctgggatctctttgtagaaacccaggatcttttcttttcctttaccaagctctaaagttaaagtccaccatgtttttttccttatcattttccccaaatcctttttcggagccgaagagtcaatatgctttctcctttccaaaaacaacagattaaatgacatgtttccctgtttgctctgttttctaggaagctcagaggccattttattattattcgtatttaaaacatacaaatttattattatgttacagtttagcaggtcagaagtcagatataggtctcattggtccagaatcaaggtgttgggtgggaggccaatgttctttttgaaggctgtaggggagaattcatttcctcgcctttcccagcttccagaggtcacccccacattcactggcaacccacatgcatcgactacccacattcttccatcttcaaagtgaacaagtttgcatctccctgacccttctttcatagtcatatctccctctgaccctggctggaaaaggggggttgattttgaggactctgattagatttgggcccacctttcagcacagattatcacagaaaacaattggtaatgaaccaaatgtccagtataaggatttagttaagtaaaattgaataaagtatgatataaccatgaaataacagctactaaatataataacaacattcccggcacatagtaggtctttagtcagcatgacttttggttccctctttcaatatgctaaataacaaccactgacttttatagtttacaaaatatttttatatcctagcctaattttcaccttataacagctgctgattgtgttttaaagttcataaacgtgagaacagagaggtttagtaaccaggtcatacagtaaatgagtggaagagcctgaattagaaaccaaggccccactcatgtgtccttgctgcaacactgcgctcttcctccccagatcagctttccactctgcacttcagcctctgataagccaactgtgtgagatggccacatgcattgttagtctgacaacagaggtgtcattatgtgcacatttatttgctggccaatagacttttgcctcatttgaaggagtgctagacatttggacacaaaaagtgaaacatctggatgaaagaaacatctggatgctcaaacatgtactacacgagctgcaagaattgcaagcatccagttatctggaagctaaactctcagaggtaagaacagcagacaactggcaaacattgaacactgggatgaacattccccaaacactggatgcttctggataccaggatgctgccttggttgctggaccagaagtttccacctgccctcttaataggcaccaaataacagagtcttcccagaacatcatccttttggatcccagcgaagtgggtgaagtgtttcccattaggatgagaaatgcaaggtgggtcccaggcagatcccagggccctgtggccaccctgccctggcactgacctggcatgtgaaccatgcggcagttgcagttttccacaatgtagcgggtctcacagtcaatcctacaggcggtgatgctgtaaacaggaaaaaagtcgaggcccatctctgaggatcggcactcaccccacggtgggggcaggtatgtgagctgcaagacaggaaggagggggcggcagtcagcctcaacagactcagtaactcattcatttacttactcaatcaacaaacaattattgagcatttaaataccattaactttatagaccttcaacatctggctccaatactagttttcttaccttactttaattttttcttttttcttagagacaaagtttcactatgttgcccaggctggttttgaactcctggctcaagcgatcctcctgtctcggcctctctagtagctgggactacaggtgggcaccatcaagccccaccctaacttatcttttataatcttcccataaatgcggttctcctcagagtctcttacccccaccatgtcttcccacttccacattttgccatcttgcatctcttggaaagacccaactaaattccaccctcttggtttgagacattggaatcccagacctagacctggaggacgaaacccagaggaagattcagaatgaaatggctctaggcactatccttcttatttatagtcctgggcctggactagagagactttccaagtcatgctgtagatggcaccttttccctttggagaaaattacattcctattttcagaggtccagtgatcataaatgctctcatagcatctatggtacttgcctagtgggaagggtgaaggatgagggaactaatggttgttgagcattttctaggtgttgagtcctttatatccatttttcaagattaaagaataaaaacacaatacaatgtacaaatattaagtgcactattcaatatattctaacaaaggtgtttgcccatgtaaccagcacaccaaccaagatagaggacattttaaaacaccctagaaagttcgtttctgtccctgtccaatcagtccccaacctacctgggtaatcacggttatgaattctctcaccataggttggctttgcctgttctcaaacttcatataaatgaaagcttacactatgtgctcttttgcatctagcttctttcactcaacatagtgtctctgaggttcatctacatggttgtttgcaccaggagttctttccttttaattactgaatagttttccagcattatgtatgactacactaaaatttgcttatccactcacttgatgatgggcatttggatggtttccagtttttggtaatcatgaaaaaactcctatgaatatttatacataagtcattttgtggacatatgttttaatttctcttgagtaaatggctagcagtggaacagctggtttgtaagataggtataggcacaactttataagaaactgcccaactgttatccaaagtggttcttctattttatatttccaccagtagtgtctgagaattctcattactctacatccatgccaaatctggacttcgtccacctttttgattttagccatttttgtaggtgtatggttgcatctcatttgtatttgtggttccctgacggatgattttgagcacaattttatgtgtttgttggtcattcatatataatcttttgtgaaatgtctgagttttttgtccattaaaaattattattttttaacttttacttttgggttgtaagagttgttcatatattctggattcaagtcctttgtcagacacatgtattgtaaatattttgtccataccacctatagtctgtggcttaccttttcattttcttaatggtatctattttttaaaatcaacttcagaagatataatttatatacaataaaatgcatccattttaatgttcaatttaataaatctttagaagtgtatacacccttgtaacaactaccctaatcagatatagaacatttccatgaatccccagaatttcctatttgcagtcactgcctccctgccaaccctcaggcaacccccaatatgctttctgttgttataaactagatttgcctgtgttagtgttgtatataaatagaatcagacagtatgcattcttttgtgtttggcttctttctctcagcgtaatgtttttgagattcattcatgcttttgcacgtatcagtagttcattctcttttattgccgagttttacttcttcctttctagtctttattattatttttatttctttttcttaccttgctgtattagctagaaactccagtatcatgttggaataaaactggagagagaggatatcttccctttttccatcttaggaaggagggttcattattacaccataatatattaggaatatatttttcttagatgtgcttgtcacattgagaaagttctgtcttatttctcatttgctgagagtttttatcatcagtgatatatattttggcaaatatactttctacttctattgagatgatcacatgatttttctccttcattctattaacacagtgaatggtattgattgatctgaagaagctgaacccaacttacactcctgggataaactccacttagtcataatttattatccgccttatatgttgctctattcaatttgctaatatcttgtggaggttttttgcatctatgtttatgaggcatattgtatttaatttacttttcttataacctccttgtcaagtttgggtattgggagtgtgctgacctcataaaattagttatcaagtgtttcctctttctcaattttttgaatttgtacggacttggtaccatttctaacttaaatgtttgatagaatttgccagtgaagccatctggacctggtgattgtgtgtatgcgtgtgaagatttttaattatgaattcaactcttttaatagatacagagacattcagattttctatttttgttcttgtgctagttttggtaagttgtgttttttccccaaggaatttgttcatttcatctagatttttgaatttgtgggcataaagttgtatgtaatattcttatcattttttaatgtctgtaggatttacagttatgtcttttcatgtctgattactggtaatttgtattctatttttccttattgttaataatttctaatttcattatgttttggtcagaaaacatcctccccatggtttcatttcttaaacatttattgagatgtttttatgatactggacaagaaaaataaatcaatgttcgattttgttgaatgttccacgtgcacctgaaaagtatatgcattctgtaactgttggcgtactgttttacaaaaggcaattaggtttagttgtttaatattgttgctcggatcttctatatctttactaattttttcatctgcttactaatcagttatgagagaggagtatcaaaacatctaactatgactatggacttgtctgtttctccctttagttttctcaatttttgctttgggtatttctgaaacttattaggcatatacatatttaggattgctacatcttctggatgacttgaccctgtcatcattgtgaataatcatctcatacaatgtccttgttttgaagtttactttgcatgataacagacatggcagctttattctcctactatttatctttttccatctactattttgttttcatccttctacttttaactgtcagaatctttatatatttaaggtacatctctttttgaatgtgtttttaaggtacatctatttgagtgttgtatcttatcctgtctgacaacctctctgccttttaattggaaggtttgatctatttacacttaatgcaatttttgatatagttcggttgaagttatcatgttgttctttgtttcctatttgtaccgatttctagttctccttttgttctctctcttctgactctttttgggttaattgaatattgttttagtagttcattctgttttctccattgagtttcaatttatagctctgtattattattcttagttgttgctccaggatttacaatattcatacttaacatcacaatataccttgaattaatattatgccagttcacatataattctatttatattgcttctgtgtcatatattttacttctacatctgttataagcactataatacactgttttttttttttttttttttttttttgagacaaagtctcactctcttacccaggctggagtgcagtggtgcgatctctgctctctgcaatctctgtctcctgggtttaagcaattctccagcctcagcctcctaagtagctgggactacagggatgcaccaccatgcccagctaatttttgtatttttagtagagccagactttcaccatgttggccaggcttgtctcaaactcctgacctcaaatgacctacctgcctcagcctcccaggtgctgggattagaggcatgagccactgtgactggtcacactgttaatattatttttgccttaagcagccagttgacttttaaggaagaaagaaagttacgttttatatttatccacatatataccattttcattgttcatcatgcttcttacagatctgaattttccatttgatatcatttcccatcatgctgaagaatctcttttaactttttttttttagaatgggtttacttatggcaaaatttctcagttttcatttaaatatacaatgttgggctgagcatggtggctcatgcctgtaatcccaacactttgggaggcaaggccgaaggattccttaaggtgaggagttcaagaccagcctaggcaacatagtgataccgatggcagtggctgcttacattatgccggctgcagctgtgcagctgtgtagctggggctgcacactccgtagagccagtgggaaccctgacccttctgagttaagactggagctccccatgccactgcacccacagctgcagacccaggcctcctgtagctcctgggcggggctacagccgcccaaactgcagctgtgtatctgagcctccctgtgctcttctgggagctggcaacaggcaggatctgccttcctgggggtgcagctgcaactgcggcacccacggctgcagacctgggcctctcactccagcaagcaggcaggagcaggggacaagtgggagccctgccccttccaagttggcaggtgggagctcccaggtacagctgcagctgccctcccaggtgcaggatctgggcatctctgcagcctgcaccctcagtggccccagaagggaccaccccaacccatccctgcaggctggtgggtgactcctcccactgcctggcctctctatgctcttggagcctcctctgaacttggagcagggttggggccatgaatgacagcaggaggcagattgattcctggcaggaaggggatgggtccccagtaaggccccaccttcagaccagagaaggcctgaaggctgtgggagggactgccagtcttgctcactggagttgggactcagggtgccccttccaggcccacccatgggtgcccatgcatgaatcggcacacacttcctcccctctgaggtccataaaagccctgggctcagccagagcagaacagagaatggccagaggaccaagaggtcagagagacaaggggacaggacgaccagctgcagagaggagtactctctctgctgatagcggagacgatgagatgatcagctgcagagaggtgtaccctctccactgagagctgcagagatggcctgccagcagagaggagctaccctccagggcctcctcgctgctgagagctgagcactcgatggggtgagctgcctgcagagaggagctacccacttctctgagctcttctaacactaaataaaactcctctccttctcctccttcttctttttcttcttctcccttcacttgtctgcatccttcattcttcctggatgcaggataagaactcaggcaaaggcaccgtggccacagaggtttccagccagaaaaatcggcaccctagagatcctgtaacaataccctgtctctagcaagtaaaaaatatagtcaggagtggtagtgcacccctgtagtatcagctactcatgaggctgaggtgggaggatcgcttgagcccaggagttcaaggctacagtgagctatgattgtgccactgcactccagcctgggtgacagagcatgagactcctctaaaacaaacaaacaaataaacaaacacccaaaaccaacttaaaaaacctataatgtcttagtttttttttgttatttttgaaacattttggctgtagatagaattctaggttgataagtgttttcttccagaatttcaaaggtgttattcctctgtcttctggcctccattgtttctgatgagaatcagtcatattctttttattgttccctgcaggtattatgcccccttttctccctctggctgcctttgtgcttttctctcggtctttgcttctcaggatttaaactacattatgcttaactgtggctttctttgtagttatcctgcttggggattcttgagaatcctggatctatgaaatgatgcttttgaacaaatttgaaaaaatattagccagtatttcttcaactgtttttctgccttattctgtctctcctttcagggataccacttatatgcatgttggagtacttgacactgttcacaagtcattggcgttctattcccttccattagtcttttttctctttatgtattattttaataatttttattaacctgtgctcaagtttggcattcatttattattttgtaaccaatcttctattgattccatgcaacaatttgtaaatttcagatggtgtgattttcagttctagggctttcatttttttaaaggtttccatatcttgactaaaagtttctcattatttacatctttttctgcaattatttaacatgtttatgattgttattgtaaagttgctgttttctaattctaacattggggttatatgtagatctatttctattggtggtttatttttcttttcctgttttccctcttcatgtgtctaggagtttttgattgtatactaggagagagtcatttttattagatactgaacatttcagataactatttttggtgactctgggtagattatctttctctgaatactgttgagttttgttctagtaggtggttaaattaatggtgaactactttgatttcatggagacattatttaaggctttgtttagagataggtatattttagttttgtctttagtcctggggtttagcccctggtcttgggaagcgatcttaactcctaaggaacaacacttctgggtttaatggaaagcctgagttgttcatcaagattttctaatttggtgagacttatattgtagcctatctccccatgcaatggcagcaactgaaattactgctcagctctttcaactgttgtcatccccctgggctttttagactctctccctatccacatacagttcaaagttcaacctagatttgtgtaaaaatttgagggctcctcctctgtgggttcctcttttctaggattttcccttccaattttcagcctttctggcaaccctgaatactgatttctggtttcttaacttaatgcctgctgatttgtggttgagctccatccccagtattcccttagaactttgaaatgccctcaagggagaactcaggtaaataaacctgtgctgtccagtttgtgcctggttttggtctctctccggtgctgtcaaatagtagttttaaaatattttgtccacagtttatgattgctatttccaggagagttagtctgatattagcttctccaccattactgaaaaccaaaaggctttatacttacttgaatatttgcagggctctttttttaggtagatgttcctattatcatgttattgatgaggaaactgagtttcaggaaggttaagtagcctgtgcaagatcacatagtgatcttgtgaggggcagagtcagcagatttcagatcctaaacttgtgcttgctagtgacccagtgccacaatgccccataggtcaaggaaatcgatgggagggatggagaaaccctccatggagcacttttcagacattatttatttaattagttagttttagagacagagtcttgctttatcacccaggctggagtgcagtgccatgatcatagctcactgcaaccttgaactcctggactcaagcgatcttcccgcctcagcctcccaaggagttaggactacagggatgtgccaccacagccagctaattttttgaacttttttttttggtagagatggagtgttgttagggtctcaatcctcctgcctctgcctcctaaagcactagggttacaggtgtgagtcatcatgcccagcctttcttttgtttttctctaactgccctgttcttcctttcccatgaagccttgctctactttgtcatgttcctctttcttttcagtttgtgagctaaacaggctttcacagagatttcctgtatgaccttgaataagtcactgctcccctctggaccttagtttctcatctgtaaataagaaggaattgggggctagacaccaccaagtcccattcaagtgttgatattctatgatttagaatcggagggagaagggtgggaggagggagaggagcagaaaagataactatttggtattgagcttaataactaggtgatgtaataacatgtacaacaaacccctgtgacatgtttatctatgtaacaaaccttcacatgtaccctcaaaccccaaattaaaaaaaattagccaggtgtggtagcaaaaaaaaaaaaaaaaaagaattggttggatcccctacattgctcaatattggatccatgaacacacaatctggattttggaaggactaatcatgccttttgggcagggactgggggtctaaaatgatgcaggttaactttgggggaaactcgtttctcttctactaaaatgggttcttacaatgggtggacaatgaatgtagctggtgaagctctggagatgggccaaggtttgttcagggtcagccacttccccctctttttttttttttttttttttttgcagaggtcatgattcagatacccctccagccctgctgtggctggttcatcatttgctccatcagcgtctctgaagcctcacacacaacagcagctggaaaattactgtgtgcacagcaccgactcttgcttaccaatgagtgtctgaaagtgggttggagtatttgtttatccgggtaagcaaagactcaggaggaccctgaagcaccatcttcaaatatctgaagaactgtctcagggaagaattagatttgttttctggcatcccaagggaaagatagacacaagaatagttgtaatacggaacgtgggatgataataacgtttatttttgttgcaggcactgtggtaggtaggcacattataagcattggatacattctggctcaacataaggaagaactttctaatccactggtataattcaataataaaatcactgtcttgggagtgacttctccatcaccagggctgttcaagtagaaactatacaactatttggctgggatgggaagagagagagattcaagcattgggtgtacagttagatgagatgacttccatgatctcttaagcctttgtgtctaatcatagaccttaaatctactattctaatttgagaatgagagatagcagaatgacccatgcagaacctcgaactcctctctttcatgagacagctgtgtgactttgggtaagctacacagccccatccctcagccccagcttttagtttccttatctgattaaataagttcagtgcccagatgctagtaggtacttgccaagacttagttctcatcaccttctcttaataaactccttcatgtttttctatcctttcatttattcaacaaatattctagctccaccttggctctctttacaatttggctaaacaggccagcaaatctctgcctttttggcttaagttattttgagttgagtttcttgtgataatgactcctgcccggttcagacatccaagtcaagatgttaccaggaagatgaatctatgggagtggagctgggagagagatctgggctacagacatgaatgtgggagtcattagtgtataatgaacatgtagggtggatgagctagcccggagatcgaggagagacacccaggattgagatgctcctgcatgtacttgacaactcatcctcccccactctttctccactgtgctatggaactggaggctttgataattgcttaaatttatgaacagagcaaggaatgcagaacttttgtgattaaataccctggtgcatgtctttcattgctccactgtctggagcttctctcaacagtcgccttcattttgtagagagaagctgatgtttgcccttaacctgcctggggacatccttatgttgttcttcaatcattgatttttccagcctctcccagaccaaagatcctaaggcacaccagtaggtggcgctgcagcaagcacagctgcccaaggcctccgcagccctcgcagccctaaggggagtccagccaatctcctaggaccttgccaagctccctgggcccttccctcctttgtgtctgcatcccacactctgaggctttgacttagatgctgctgtgagtggatgctgagaagatgatgaaactgcctaagagtatgtggtttctgcttctggaatgggcaggaaagcatatatgaggagagaggaaaaaggagggagacagggagagatatccacctggctcacctgatacccacctggctcttctgttatgtcagtcactaggccttctgccacagggataggacacggtgctcacagggctgttccatggtgccacagggattggacatttgctcacatggaccaaattccattaggcttgggggtatccctgagggttcctgcccaggtggaggtcaggatcctcagccttgcctggcctggcctcctccctttcctcactgacccgtgtgtctgagatcctggctcgtcttccgctgggaatgactatttaagagcctgtgctccgtggtcaagattaagctggctttgaatcttggccctgacaccaccttagctgggggacattggacaaatggttgagcctctctgacctttccttctgcatgagatcaatcctgagatattggctgcttcagaggatgctgtgatttttgaacatgttaaagtatgtgtaacccagatattacccttggctgacatttgctctctgttctgcataataggacctgacataaaatgcagccccttgttaagttgtacagaaggcccactcacccaaagcattagaacacacagaagatgtcagagggagttggaggagggggctacctcagagcaaagcaaaaccttccactggaagagaggattctactcctccttcacctgcctgatcctgctccctccccatctttttctctctttcttctccctcctcctttctctctcactcatgtgctcttacccttttccaggagcagaatcaacatgttcctaagcagtttcatcctattctgaagtcttggcacatggcaacatcctttcccacagagtctcactatatcatagtattttcccaaggaaaggaagttccctccctaagaggaattccgaggctagatgttaagatatttttctgccttgttgtgtaacaagatggaacatctccaagagtgcctgatgtatacagatggtgaataaacggcagccatggtttcactgtgagtcagtattgcccttctatctccctagttaggaggttggctcagggagtgcagtgagtgatggctggagcccacctggccatgcctttgcatcagtcatgaagagacacactccaatgacctatggttccaatgaagtctcctctctgggatctctgtctgtgtattattggctgggaagctagcatccaacagtttgaccacttcttcacaatggtgtcagcaatgcaatgtagtggctggtggtgtgagaagagcactattggggcaggaattgtaacctctcagcctaatgtatctgctccactaaatcaggggtctggaccagatagtttctaagctccagggtcttcaaagtctttgagtctacatatctcacttactgccatccaggacagatggtggtaggtggatgggctactctcagatgattagggtggtctaaatgtttaggtcagaacatgctttcttccttttctttgtctggagaaaccgatcaagacgaggccagcatgaccctggcttagagccagcagaaagccttctctctgagaaaaactgccttgggaacggaggcaaaaagtctcctttgcagtctgtttttcagacagcatagtcaaaaggagtgttcagcttgctcagcaaggctctatcattgacaagatagtgctcaacctgatggacgtgtcctttgaaagtgtgagagacaggagtgggggtgcgccctgggctgttaccttgttgggggcctcagaaaggcttttgttagcccaaccagctgagtggtccaacctaatcatataaagacttcattaattcctaggatgcgtcaggcacagggccagacactggggctatagagatgagtaaaacagggtacttgctctcaaggggcccctgtttgcctgagcccctcccgctaccatcttgaggcacatctccagagccctggagcctgttctctccctcctcctcctgcccacacagctgaggggtggtgggaagaactgatgagctgtgtggtcttggtcaagttacctaactactctgggcctcagtttccttatctgtaaaacagagataataatttgcaactcctaggacttcctgagagttaaattagacaatagacatggatgcaccttgcacagtgtttacatgcgtttgttgagtctgagtctttaggttaggaaagcacttatgaaagtccttcattcaagatggcagtatggtggctggtctctttgcctgtcctaattgccatcctcctctcagaacatccccacatctcttcttgctcactggatctcagactttgacacatagtgggtgcttgatgcttgcttgttgaatgaatgaatgagcgagcaaatgaatgaatttccctatcctactttctcccagccccagaccagaggataagtacaagagactgcctcctctaagccagaactcgggttctaaccactggaattgacaattcccctttggctagggctggcttaaatgctccttctgtgggtgtcagctgagttctgcactctgctgaaccaggctgaagccaggcaggagcagaatgtccatgctggtcctcatgggctctacaatgaggtgggcttagcaccaaatcacatctgagttcaggactagccgatggtcaggatttccagtgtgatcttgggcatgacactcaacctttctgggcctttgtgccccatctgtaaggggcactatactccgagaggccctaggttctaggatcaggtggccctgtgaggtccccctgtttctaaccttgtgccttgtcagctcccctctttttcctgcctcccactataagtgcaaatttctgtcttgccccacccagttggagggcaaatcagagcctgctttttgagccataatgttcagtttgatgtttttattgcatcctgctgcatgatttaagtgtgtttgtatatgattattattgtgctccttttaaacaatttggaaatcaaatcacatactaaaatcaaatccaccaatcagcaggtaacagaggcatcaaaggggtctcaggggagacatgtccttgtaggcagcacagaagcagtgagacaccctcctcctgcctctgcctggcttcagtaagggttcaacccagaaggtcaaagcagaaaggatgagatcaagaataagcaaaagtcactgttaagagatggagcaataacacctgccagttggtgtctgtggattaaaagggatttaagaatattatctcttttaatccccacaataaccctgtgagactgggtactacttgcccaaaagactcactgtagattaactgatggtataaatatagctgatatttgttgaacctttactatgtgccaggcactgttctaagcattttactagaaccgtctcattgaatcctcataacagccttatggaattgaaactttgattgtctctgttggatacctggtgagactggagcccagagaggttaaatgactctggtcacattggacagtaggtggcctagctgggattggaacccagcagatcatactttttgcaaccacctgagactgctttgtctaaagaaagaatataccacagcagggtggagtccacaggaagcagaggtaattactgagtgagtggctggaggccattgcagagatttttgagatagggatatgagttcttcagaccccaatatgggaaacattgcatagatgcatcaaacagcttagttctcacaacaaccttgccgattaaacattatccctgttttgttttttttttttgagacggagtctcttccatcgcccaggctggagtgcagtggtgcaatctcggctcacctcaagctccgcctcccaggttcatgccattctcctgcctcagcctcccaagcagctgggactacaggcgcctgccaccacgcccggctaatttttgtatttttagtagagacagggtttcaccgtgttagccagaatggcctcgatctcctgaccttgtgatctgccttcctcggcctcctaaagtgctgggattacaggcgtgagccaccacactcggcacatccccgttttactgatgagcaaacttcagtcacttgccacactgctaagaagtggcagaggcaggattcaaaagcaagttggtctgaccacaaggctactggctgggggtcaggggacatcctaatcttggctctgctattaaccagctctcgtctctaggagacttagcattttcatctgcagcatgtaggttcagaatagataacctgttgtgtagtacaggtggtgggtgctctataaggcaaaccaggggactgctccccattccctccaatcctgggcatatggcaaacatcaccaatcaatcacagacactgtcttagaacttatctaaacactgccatttgattgaaattggaactgagaggaaatgttccattttgggaggcttcatatgtagaaaccatcaaaccacacattgctaaatattcacagagaacagacaaaacttattatgtattatataaaatacagaatgtgctcagcatgacttccccacaagaacagtaaccacaacctgcctgcttgtgaaggagtgtccctgactggcgtttggacaatcagaccacacagggaatcaccccatcagaatctggggatgccctcctcctgccctggaatcacacacagctgattgttgtgctggttggaagcgaagttgcagtagtagctgatatagcactttgatgagcaacaaaaatcaatttaaaaagtgaactacccatggtttgtgatgaataaaataataagctcatatccattgcaaaaatgtctatgagtgggagagaatgtgataagagcagaaaatgtgaattggttatgcaaaaaagcaacaggatttttttttgaaagactataacttgactcattctaacacgacttttatcttgggccttgctggctctagatatgcctctggagctctgcgagaatcctttaagctttgatgtcataagagcctctgcagttttgtttccatctgtccatccatccacccacccacccattatctgtccatctgttcatccatctacccatccatccatccatccatccatccatccatccatccatccaaccatccatccatccatcttcccatgccccccacccatccaccttctatgtgtccaataaatattttttatttttttattttttttgagagtgagccttgctctgtcacccaggctggaatgcaatggtaagatcttggctcactgcaacctccgcctcctggcttcaagcgattctcctgcctcagcctcccaagtagctgagattacaggcacccgaaactaatttttgtatttttgtagagatggggtttcaccatgttggtcaggctggcctcaaactcctgacctcaaatgatctgtctgctttggcctcccaaaggttgggattacaggcatgagccaccacgcctggccccaataaacatttattaagcactaatctgttccagaaacactgctaggaattgaggctatgaagatgaataagatatgattcctacacccatggggtttagtctaaaagaacagacatgcacataaccaagcaaatgctatagtggggtcataatgtccaggcgtagtgggggcactgaggagggcatggtccaactaattgggggtgccatccggaaaagactttatggagggggtggtcacctttgagctgagtttagaaagactatgtttttttaggcagatcaggagtgggaaatgtgttctgggtagaggatactgcatgtgcagagatacagaggtataaagaggtataaagaggtggggaagcctcaagcaatacagcaaggctggcatgtgggtgagtgttgggctggggtacaatgcccggtgcctatggagcagccccaacactgtaccagctgagggcctgaacagttctccataattgttaatgtgaatcctacccacgcactagtaggtatcacccttgttaaatgatactgtgaatcctaggtatcactagcaggtctcgcccctgttaaatctgtgccctcccttcctctccccaacataagagccgcctcagcaagaagagtgttttcagtgtgcctgtgcatgccgacgcaccattataatcacatcttcatcgggacacaatttcttgggcgagtgctgtcagcggcgccggaagcatgttcccagcaaattgcctccgtgtatgatttgttgattgaaacagggggaggagaagtgttccagggatgcaggtggggaggtggactcacccacaggaaggagcctgggctttggagttacgcaggtgtggcttggctaatggggggctggccaggcactttacctctcagagctcagcttttcttcagcccctccagccacaggctaggatatcagctttgtcttttctgggccagggtcatggcgggggccaccatctgacctgccagtgctgttgggatcctcaagacatagtactgagagggagagtcctgactcctctgtaagctggaaaggggcaattttcattccagattgcatctctgtcctgcattttctccccacacgccttctcctcctccgtttcctctttttctttttatggttgcatttccatctttctaagaaaattcctgagtccaacttccaccctcagctgaagaatctgaagaggtcaggagaagtgacctttctctatgtgaattggactatctcagagctgccgggtacagctatgcagagcatgcactgcgcaactgcaagagggtctactcatatggactaaggtgtgaatgaagcctccagagagtgcacaggcgcagccgtgaattgtttgtttccctgtactgtggtgtcatctggggcttgactctgctccttagctagtcatccatcttcaattcccatcattctactcttccccttaacatagattacacatatgacatttacatggcaatggagacattcctggatgagtgacaagggcaggggattggggtggggtcaggagtgcgtttgttggggtataaattggcttccattcactatctcttttggaatagcggccttttatttccttgcttttttcaatgggtgtatttgaaatggaagttgggtccaggttggaatatttgcttaatgggttttcttaaagtagagcacatctcaatgcatttgctgcaattttggcttttgctctattcaaaatccactttcccccacctgagtgggaaatgaaggagtgtctcttgtcccagggtggcttttgcccaggctgggagtgtgagggagtgggtgctgggtgtgtgtgtgtggggagctgaatacaggggaagcctgcccagctctggcctctgcagcccgcctgtcctcccctccagccatgctcccccaccacaaccttagccctccatagcctcagaacagatttgttttcagctgacccagcaccaagcttcagggcttagccctgaataaaaaaggaaggggatgtctgttgagcccctgcatgggtggcaacatgtcagggtctgtgtgtgtgcagcctcagttaatcctcactgataattctcccttgagtggcagctgcagcagattgacaactccacgcccaacactccaccagggaggccgctggaggccgggcagagtcgtcagaatgagccccagtcaccttcttcctttgggacactactgcaggggcagggggcccacagggcagaaccaaccccggagcccaggctcaagagctggatgagtttcttccctgcactcgtgatgccgcatgattaaggctctgctgcatccctcagcgcctgagatggcctcgcaggaagctctgtgcacaccaagcagttgccataaaattcatcttttattgtcctcttcctggatcttttcagtgggggaatagtggatgcttacaggcataaaacatgtgtggcttttatgggattctgccagggtgaaatctgggatccaaactttatgttcttgacccccttccctctcagagttgagggtgaattccctgtcctcatccctagaaatgctgcaatccttggcatactggggcacatgtctcacatggggcggagctactttacagatccctccccccactttttgtttttttttagagacagggtctctctgtcacccaggctgtagtgcagcagcaccatcatagctcactgtaccctctgtctcctaggctcaagcaaccctcccacctcagcctctgaggtagctaggactacaggcacatgtcacccatgcctgtctaattttgttattttttgtagagacagggtctcactatgttgctcaggctggtctcgaattcctgggctcaagcaattctcccacctcagcctcccaaagtgctgggattacaggcatgagccactatgcctggccttactttacagcaagtaaagtactttcatttccactaaatgatttcagttgtatatggctgaggctttcttttccactaaatgatttcagttgtatatgattgagccagtgctctagccagcattggttttaaagtctctggggtacatcatgaaaactttgaatgggaattgggcagatgctgcccttcctagatgtaatcttgaatgctttgacaattaggaaggactgcgatggaaagataaatataccatctacctcaggagttcaaagtcatttttatttgtgatggactgaattgtctgtctctcctccccaaaattcatatattgaagcccttacccccagtgtgacaatttttggagacagatcctttaaggaggtaattaaggttaagcaagatgataaggttggagtccctggtgtctgttgaagaggaagacatagcagagctctttctctctccacgtgagcactgaggaaaggccatttgaggacacagcaagaaggtggctgtttgcaagcctggaagagagtcctcaccagaaactaactctggcaccctgatctcagactttcagcctccagaaataagagaaggtaagtgtctgttttttaaggcactcaacctgtggcattttgctatggcacctcgagctgactaagaatctctcatctctctcatggacaggcacacttcagtttgtgaaccagtaaagccccatagcttcttgatcactgctcactagggcctctcgtctctgaggatcatgccttaggaaactggggatggccagcgagctcacacttgaacgtatctctcaagatcaacctacagctaggaagaattttgatagtaaaatccaggtaaggggcttaatttctggatgggccttgtatgtcctaatgcatgttatggttattactctcattttccagaagaggaaattcagtcaagagagaccacgtcatctgctacagattacacaggtggtgcagttgagtccttgaaatctgctccaggtctggagccctgggccttaaaaacctgactagtttccctagcactccctggatgggagttctccctgggtcctgtgggcccatcccagggcctggagttccaggttgggtttggatctttgtccctggtacgggggtctccctgtctgcctggactttggggtgtggctgcagagagtggattccctgtcaatttcacctgatagagagggtctggtcctacgtattattttcttccaggtttccctgacctccttgctggtccccaagaaggacatgcactcttaccttttcatcaggggctcaaccaagtgacatcagtgtccacacaggatgccatgtgggcttccagaagagatcatttggggatcacagaggcaggaaggggcagatggtgtaccatgttgtgaaaagagcgtggactttggtattaggcaggtctggattctaattctcagctgtccctttgtctgtagaagggagacagcagtacggccccacagatttgctgttcagactgaatggaatgtcctaggagagtgtcggcacaatggaacacagtgacttctttgtcaatatttgggagtagcatggtgtggctaaaagacttagctgtgtgccaaaggtagacagtttggggctggctgtctcatttattggcccagtttccctgtctataagctgggaataacagctcatatctcactgtttgagaatttctatgtttcatcattttaagatgcataattttctatatcctaacatgtctataacatcttaccattaatggcctcttagcattgtgtttagtttaattagtagtgtttttctttcctactgtcacatgaaataatattgacccttacagttggagttgttaccttagatttgatgagatacacagcaaatggactcatgattgcaaacggctcagtacagtgcctggaacacagctggtgctcagtcaatggcagctgttgttattattgcctgtagaccatgggtaagttttacaaatgctgttgagcctcggtttcctcatctgtataatgggaatacttagctttacattacagggttacagggagttttaaatgagattaacatatagactgaagcatctaccgcagcattttgcataaaacaggcgctccaaagtgtgctcctcttccccaggactgcaccaagagaaatcccccatgcccctcaccattttggaattatggcaaggtgggtgggacagggaagggaggaaggggaaagagactcctcatgcctgtgctcttttgtgccactggactatctgtctcctgctcactgttgcctcctagtggtcccaaggatcagggcaaggctttttgaaccagatgggaatgttaggaaagaaaatgctatcgggtaagcctgctcagcctgaggaagacctcaacggaagacctgagccccacctcaggaacttcaactgagacgatgtaacctgctgagccttctgctgaggttttctttatacctgaacgtggccgctgggaaattttttcagatctcagatctaaactgagaggccattcctcagctcccactcgcctctcaaaacacacctctatgctggagacgtagtaacagagggcaagtttggttgacaaaacgtattggcggcatcccttctcttgtatgctcaagagaccatggtctggattgggatcagtcagcctcagtatcaaatcctggctctggatgaccatggcctgtgacatcctctctataggcctcagtgtctttattgcatgtatagggtctgccatatagtctgtgctcaaaaatattaggttgcctatcccacttccctcttccctaactcaggggcattggaaagagcactggaagaaatcgtaagcaatattgactttaactacaaaatgctcagatgtctttcctgctgctctgatgaagtggtctttgaagtgaaacatcccctgcaagtctgtaacatcatagatgagcagatgcaaactgttagaccatgaggaaatcccgggtgctcacttttcaaagaggaacaaataaccttcattcaagcctggctacttgagattgttccatggaccatggccctcctgcttggtggtggggagactggcatgtggaaacaccatgagaaagtgtgggagggtaggggtgcagggaaggttggactgacaccctctggtcctggtgctttgcatagattaggtatgaggtaggtactattgttatccctgctatgcagatgaagaaattaagatggagacatgaagaaacttgctcatggtctcattgttggctagtcatggagtcagaatttagatttcaacagtctaatgttgaagccctgcactactatcctatagtcccataccaaggtacccctccttgtctaataccagatggtgcccattgcccctggatagaccttcttttcagagacccattgagagatttctgtatgtctcaggatgctttgccaagggtctctttccctttcagtggaggacaggcatatcatcaccattttacagattgaagacagactcgcaaaggcaaagtgattttctagaaataatttagcaggtcagaggtacagtttgaatgagaacccaagtcttttgaatcctggtcctaccgcacactgaaccagctgtctcccaatcctgtgccctgcccagctctctttctgggttactgtgtgaggaagaatatgatcccatacactgcaagctagacccctgaattgactatcacaatattcacagccctgtgaattcaagttttgtcatttcctggaagctttacaaaatattaataagctgatttactccctggcatcttcttgagactcctgtaggcaagcacctcatctggggactgagttgaggttggagtcagatgtcctaagcttgaaattcatccttgccacctgctagcttggtgacctcgggcaagttagtgaacttctttgagtatcagttacctctgtgtgaaataggaataccattcttcatcttggaggggttttatgagatataagaacagaatctagcgcactgcctatatgacatatagaaggcagtcaatatagcagagatcctcattggcaaaagaggacagaaaaattttgtctgccttaagaaaatccagtctgtgaaattcacccaaccttgggtcagggcagacattatttcaattattcaaggatccatgattttcacaaagggtttatccagggccctttaagtggcagctacatgtgcaagctgccatgcctgtttacgaatcattagctacttgacggtgatggtagcgggaagagaaaaagagcaaagcccacattatggaaagccagtgctgggagccactgactgctagaaaccaaatgggactgcagaaaaaataggtctgaaagaggaacccatggaaaagatttcatttataaatacgtatctcacccttgttctcagaaacccatccttcagttgttgaaagcaagatatgaacacacagagtcaggcaccgccaaatgctttcccctaaactttaaaagctcagtgacaggtgactggaatgagccttcacaatgtaagatgccaattacaaaattgttaattcttctggctgtaatttatcctgctatccctttgggtagctaaacagctttgatcatgagttgcccaatcagcttataagtcttcttgatgaatcactgtcattctccccgtcctttctctgggctgcagtaattcttgacaactgccttagagcctctgtctcctgtcgatgcgagagggaagagccatctattaggaggagcatgtggagaacaggaagctcctggcattgaggagcttggcaggtggaggataaaactctctcttcaggatagatagggcagaggacaggatgatggatacagcctctacccagtgacctccagggtatgaggtccctgcttgttggggtctttgggtcgggggtggctaggcaaatcgtgcccactgagctctagcgggtatccagaacatcttcagtaagaaaatgccatgtgctaacagtgagttcactgcacagataaactagggcagttctccagtattggaattctcaccttcttcctaggctgactgcttttcccagctctccttgaatctaggagaggcacgtgactagttctcaccattgagatgcggtaaaatagaagtgatgtgggatcccctgactgagtagatgtgctctctcttttaccagttgatagctaaagagagatgagcctgaaaacctacaggaggacagagacaccagttgagagaaggctgggtccctgaatggcagcatggagaaccgcccaaatgccaactgcattggattgcaatgtgagtgagaaacacattcttattgtattagtgttaaaccactcagatttaagggttgattgtcacaacagttagcctcccctgcctaatacaggcaattttttattagttttattagtaaacaatactttatttaacagaactcaaattatccaactcaagaaaatcccaggcggccgtctgttctgagttagcatgatggcttctattaactacatagcacattgcaattcacctctgatatctgttgtatgggaatttagcttataacttgaagagcactaactgcatggattcttaatttttagacctgaaaaattattctttttgggagttggagggaagaacacagtctcttttaaaaaggaccttggccccttttccttctcccttagcctccactggaggtgtgaaaaggacctacagattccattttcccaagtcaatgtaagcatcccttcttctctaagttgaggctaatcatttctctccaggactgttgcaagagcttcttaactggcctttgtctcgtgtataccctcctccaatctgacccccacctgatcttactaaaatgcagactcaattatatcatcatcctctctggtaaaatccaaaatccttttcttcagaagaccctctctgatgggccttcctacctccagtctcatcttcctgcaaaccatcaggctcttgtagccactctgcctttactcttttttttcctttataagaggaagctttattgttaattatttaccttaatagtttcacaaaaagggacatattaattcagttcaacatgactggcagttagcaaaatctagtgaagcaagcgtttctgattgctaaggatttaatctggatgcttttaatacttagccatctaacacttcaaacataatccagaataaatgcatcatctccttccctttcaccacaatgccgcacctacctttgctctcctgtatccctgccaggattgttctttctgcttgtcagcctgcaaccatctacccagctttcaaggctcagtttgtgcccttctgccaagatgccttctccacccattccctctgcttttggatcttggtgttcagcctgagttttatcccagcacctgcaacaccacattgtatttattgcctgacatgcccatctcctgccagcctttaagctttttggggaggtaggtaggtgactgattactctttcccagggctggcccaaatctggggctcaaatgactagacttctggactctgtcgctgccaaaccagttaccaaggtagctttccctccctgggcctcagtttccccataggtaaaattgggagcttgcttagcaagtgatagtccttgatggcctgcctctaagggcttttccggtttcagcatcccaggattctatgattttaccactaacattgtgcagtcatgtgagggaaatcaatactcagagtttttcctgtgtgtgagccacaattcttcagaagactgtccttgggggtgcatgtggctctcagctttgcctgacaccagagagaatttatcattagagaaaagcttatggtgcaggtttagcaaatgtggcgtctcgggcgttccagcacttcatttatcaagtaaacacagcttcgttatttagacttcagtcacttggctcataaaccatcactcagatataaaaactggggtaagatgtcctatttattgaccctgatgagaaatgggtgtgatcaattatgccacggcatgggaagaaaagccttttgcaggcttgcaacttgttacacggttgcttttattttagggcgtgatgtagggcgggcagggggaattctcaacacatttcatgccacgccattagcaggttcaaggagctccatcaccattggccacatggccttgggtcagttccctcccctccactcagcccatgtcagctcctgggtcacagctctcctacatgcatttcccagggttgacattggggtggtttacccctttcccagcactccaggaatacaatgcaggacagtctgttgtatctaatggagttacattcataggttttacaagctcaaaacagtgagaattcatggttgttatgattcgggcaacccctccttgccaaatgcctggcctgggatatgtccgatttggccctgatggctgcatgtgcaggaattccttgggtgtcccccactcagtgctggccacccaactcactctgactccagggaagcccttcacctcttagctcagttgccaccttttcctctcctgctccaggactcctcgttcctcaactgtcgcttctggttaccaagggcctctggggtcagccagccttccgagaacttcctgctcccccgtctgcttcacattcctatgttatggctgaattttctgatgagcctctcatgccctgcctcttcccgaaagcttttctgactcgtccttccgcttgtcctgctctgtcagtcaggctggagtgtagtggcatgatcatagctcactgtaagctcaaactccagggcttaagcgatctttcctttggcagtgtatttctactaagaaacctcaagtccagggcttggtgtctgatttttatattcaggacgccctttctttttttaattcaggaaattcgcaagttaaattgaatcccagatggcactgtttgagcctttctgcccttggcctctcttcacgggaatcataagaaaagcgactgcgccatgttctctcggtcttgtctcctccgtgataaatggtggaattaattgaatagcagagctggatcacccagggcagtggttgtcaaccgcactctgcgtcagaatcacctgggaatacttttataaatcacagaagccctggactcagccctaagattagaattcagttgtttctggcatggactccaagtactagtatttttcgaaaactccctagaggattctcatgctggagctaggttgagaaccgttcatctagtccaacctatttgacagaagggaaaactgagatccagaaaggccaagtgatttgcctctggtcatgcagttggctgcagaggtggggctaggcttcagttttctggggtatctttggattcctcattcaaagacccaatcagcccactccactgagattttgctgtagccacaggtggacacaccaacacacccaaagatacacagctgagtgtatgaaattcactctgtattggaaaatccaggcagaaattaacaatagaacttggaaatgaatcgaagtgaaagtgtccaagttaaaaatggacatgcttaatgttgtttgcttgaccataacccctgacagtttggggttgggggaagatagccccttcccagccacccccctccctggcccagtaggattcagccttctttagggaatagacacaggttgagccatgttgggactctctgtgaaccttttccaagctccttataccctgctgtcagagagcctgacatccccactgtaatgtgctgggtgttcagggctggtagcctaggacgctctataaagtttactggccagcgaatgaatgactcaccaggaatcgatacagttcccatctgggattgctcttagaaagaaattaatgagcagaataggctattaaattatgtaggaatgtaataccccattgaactggtgtcttcaagccagtgagctgctgtcatcagaaggagctgagcacgttttcagctcttctccagccacccagggtttccttctgaagccagagaggggttcacatatgctgtcacttgcattatctctcaaagctactgaccatctgttgagaagcccaggccacattgtactttggtctctctagattttgaacttgcctatttatttacttccacaacatcaacaggcccagtgtgaatggtgtgtgtatgtatgtgtgtgagtgtgtgtgtttaaggaggtgggaagggaatggaagccacagcagagatgagctaaattagggctgtctgctgtaatattagggccctgggcactgaatggcaagaggatctgcattacagggaggcttgttagaaatgcagattcctgggcctcaccttgagagagtcccatgcagttggtgtggggtgaggtccaggaatgcatttaacctgcttcccggctgcctctaacacacactggagttggagtacttcattctatacttcaaattctatactagcttaggaaaacttcattctatacttcaaatattattgtggtaaggagcagtgtgaaatcaccccctctgaacctccatacctgagctataaatcaaggggaaggacttgatgatctttaggtctcttctgtctctatgtgcttgtcattttcctaactgtccagggaggtggacctgaacatgatggctggaagccaatgcaagagttttaagatgctggataacatctttgcagggctggctttgttgtgacgactgactaccaaaccccagagtcttccaaggtttttctgggcagaggaactgccctttctggaacaaccctccagagaatggaggaaagaacatttctaagcagaagcccagtgattctgggttgaaccgcctggaaaccccgtggaatggttctggttgaggctttgcctccagggctgacctccagggcaggaagttctggggaggagctatggctgagatcctcagtggttaagtcagcccagtcacatagaacagtcatagagtcataggccagcccaactccagaggccatcagagtcagcacacttctactggcattagaggtggggcatttggaagggcacagaggactgaggctgaacctgcacagattctggatgaagttgggtgtgcctccctttacaaattcgagtttcccagtaaaagttaagcatacatctttttaatacattgatgaaagtctattttcagggaactacatattaaaaaaaaaggtatgtatgccagatgccctctgtatagccatgaaagtccctgtaccatggaatggcaattaacgaggaaattaattttgaccaggagataatataagtgattgaacttttacagagtattttcatatacacaagcttatttatcctgataataacccctgggaggtaggtaaggcaggctggtaaaccgaggcacagctgttcaatgacagacctgaagttggaacttgggcctcctttgtcaatgctcagaggtgaggccgactggaaaaggatgggagatttgtttggtaagagtagatttccacggattgttattttttagcaagccaactcttagagtgattgaaaatacctttacttcattaatctacatgcaattttctaccactgttttttctcccttctgagaagtcaaaaaaaaaaaaaaaaaaaaacaaaacccaaaacaacaacaaaaaacaccaaacatctttttgcttcttatcacttcactttgacggagctcagctcataatacaattctactgctggcaggccctggtttttcttgtctatgactgtcagctgtccagtaaccatctatcttcctttcggcccctactctctcttctcttttttacatgaaaatctttgggaaaatacatttggcaatattttttttcaagagacttgcaaatgctcattacccctgatgcagtcatctcacctttccagaaaccagcgtaaggaaagaattaaaattagcctaataaaataatctcaaagctctatgtacaaagatgttcagcagaatattatttataatagcaaaaacagataaagcaattcaagtgttcaacaatagagagatgataagtaaattatatgtctgtttgatggaaatattatgcaatcgttaaaatgatggatatggagagtacgttggatcaaggaaatgacacttccaacataatgttgaacagagaggagcagcacctgcttatactgtatggttatggctctaaaaaaaccaaaaaccaaaaaccaaacccacaaaactatatgcggaaaaagataactgaaaaactgttttgaagtattaaactcaggatgtctttatatatatatatattttattatactttaggttctagggtacatgtgcacaacgtgcaggtttgttacatatgtatacatgtgccatgttggtgtgctgcacccattaactcgtcatttacattaggtatctctcctaatgctatccctccccactcccccaaccccacaacaggccccagtgtgtgatgttccccttcctgtgtccaagtgttctcattattcaattcccacctatgagtgagaacatgtggtgtttggtttttttgtccttgcaatagtttcctgagaatgatggtttccagcttcatccatgtccccacaaaagacatgaactcatccttttttatggctgcatggtattccatggtgtatatatgccacattttcttaatccagtctatcattgatggacatttggaatggttccaagtctttgctattgtgagtagtgccacaataaacatacgtgtgcatgtgtctttatagcagcatgatttatagtcctttgggtatatacccagtaatgggatggctgggtcaaatggtatttctagttctagatccctgaggaatcaccacactgtcttccacaatggttgaactagtttacagtcccatcaacagtgtaaaagtgttcctatttctccacatcctctccagcacctgttgtttcctgactttttaatgatcaccattctaactggtgtgagatgatatctcgttgtggttttgatttgcatttctctaatggccagtgatgatgagcattttttcatgtgtctgttggcagcatcaatgtcttcttctgagaagtgtctgttcatatcctttgcccactttttgatggggttgtttgttttttttcttgtaaatttgtttgagttctttatagattttggatattagccttttgtcagatgagtagattgcaaaaattttttcccattctgtaggttgcctgttcactctgatggtagtttcttttgctgtgcagaagctctgtagtttaattagatcccacttgtcaattttggcttttgtagccattgcttttggtgttttagacatgacgtccttgcccatgcctatgtcctgaatggtattgcctaggttttcttctagggtttttatggttttaggtctaacatttaagtctttaatccatcttgaattaatttttgtataaggtgtaaggaagggatccagtttcagctttctacgtatggctagccagttttcccagcaccgtttgttgaatagggaatcctttccccattttttgtttttgtaaggtttgtcaaagatgaaatagtgtagatgtgtggtattatttctgagggctctgttctgttccgttggtctatatctctgttttggtacaagtaccatgctgttttggttactgtagccttgtagtatagtttgcagttgggtagcatgatgccttcagctttgttcttttggtttaggattgacttggaaatgcgggctcttttttggttccatatgaactttaaagtagttttttccaattctgtgaagaaagtcattggtagcttgatgggggtgccattgaatctataaattaccttgggcagtatggccattttcacgatattgattcttcctatccatgagcatggaatgttcttccatttgtttttgtcctcttttatttcattgagcagtggtttgtagttctccttgaaaaggtccttctcatcccttgtaagttggattcctaggtattttattgtctttgaagcaactgtgaatgggagttcattcatgatttggctctctgtttgtctgttattggtgtataagaatgcttgtaatttttgcatattgattttgtatcctgagactttgctgaagttgcttatcagcttaaggagattttgggctgagacgatggggttttctagatatacaatcatgtcatctgcaaacagggacaatttgacttcctcttttcctaattgaataccctttatttctttatcttgcctgattgccctggccagaacttccaacactatgttgaataggagtggtgagagagggcactcctgtcttgtgccaattttcaaagggaatgcttccagtttttgcccattcagtatgatattggctgtgggtttgtcatagatagctcttattatttttagatatgttgcatcaatacctaatttattgagagtttttggcatgaagggctgttgaattttgtcaaaggcctttcctgcatctattgagataatcatgtggtttttgtctttggttctgtttatatgctggattacgtttattgatttgcgtatgttgaaccagccttgcatcccagggatgaagacaacttgatcatggtggataagctttttgatgtgctgctggatttggtttgccagtattttactgaggatttttgcatcgatgttcatcagggatattggtctaaaattctctttttttgttgtgtctctgccaggctttggtatcaggatgatgctggcctcataaaacgagttagggaggattccctctttttctattgattggaatagtttcggaaggaatggtaccagctcctccttgtactctggtagattttggctgtgaatccatctggtcttggactttttttggttggtaagctattaattattgcctcaatttcagagcctgttattggtctattcagagattcaacttcttcctggtttagtctcagaagggtgtatgtgtcaaggaatttatccatttcttctagattttctagtttatttgcgtagaggtgtttataatattctctgatggtagtttgtatttctgtgggatcggtggtgatatcccctttatcattttttattgcgtctatttgattcttctctcttttcttctttattagtcttgctagcagtctaccagttttgttgatcttttcaaaaaaccagctcctggattcactgattttttgaagggttttttgtgtctctatctccttcagttctgctctgatcttggttgtttcttgccttctgctagcttttgaatgtgtttgctcttgcttctctagttcttttaattgtgatgttagggtgtcaattttagatctttcctgctttctcttgtgggcatttagtgctataaatttccctctacacactgctttaaatgtgtcccagagattctggtatgttgtgtctttgttcttgttggtttcaaagaacatctttatttctgccttcatttcgttatgtacacagtagtcattcaggagcagcttgttcagtttccaggtagttgagcggttttgagtgagtttcttaatcctgagttctagtctgattgcactgtggtctgagagacagtttgttataatttctgttcttttacacttgctgaggagtgctttacttccaactatgtggtcaattttggaagaggtgtggtggggtgctgagaagaatgtatattctgttgatttggggtggagagttctgtagatgtctattaggtctgcttggtgcagagctgaattcaattcctggatatccttgttaactttctgtctcgttgatgtgtctaatgtggacagtggggtgttaaagtctcccattattattgtatgggagtctaagtctctttgtaggtctctaaggacttgctttatgaatctgggtgctcctgtattgggtgcatatatatttaggacagttaactcttcttgttgaattgatccctttaccattatgtaatggccttctttgtctcttttgatctttgttggtttaaagtctgttttatcagtgactaggattgcaacccctgcctttttttgttttcgatttgcttggcagatctttctccatccctttattttgagcccatatgtgtccctcacgtgagatgggtttcctgaatacagcacactgatgggtcttgactcgttatccaatttgccagtctgtgtcttttaattggagcatttagcacatttacatttaaggttaatattgttatgtgtgaatttgatcctgtcattatgatgttagctgcttattttgctcattagttgatgcagtttcttcctagcatcgatggtctttacaatttgtcatgtttttgcagtggctggtaccagctgttcctttccatgtttagtgcttccttcaggagctcttgtagggcaggcctggcggtgacaaaatctctcagcatttgcttgtctgtaaagtattttatttctccttcacttatgaagcttagtttggctggatatgaaattatgggttgaaaattctttcctttaagaatgttgaatattggccccccctctcttctggcttgtagagtttctgctgagagatcagctgttagtctgatgggcttccctttgtgggtaacccaacctttctctctggctgcccttaacattttttccttcatttcaactttggtgagtctgacaattatgtgtcttggagttgctcttctcaaggagtatctttgtggcattctctgtatttcctgaatttgaatgttggcctgccttgctaggttggggaatatcctggataatatcctgcagagtgttttccaatttggttccattctccccgtcactttcaggtacaccaatcagacgtagatttggtcttttcacatagtcccatatttcttggaggctttgttcgtttctttttattcttttttctctaaacttctcttctcgcttcatttcattcattcgatcttcaatcattgataccttttcttccagttgatcgaatcggttactgaagcttgtgcatttgtcacgtagttctcgtgccatggttttcagctccatcaggtcctttaaggacttctctgcattggttattctagttagccagttgtctagtcttttttcaaggtttttaacttctttgcgatgggttcacacttcctcctttagctcggagaagtttgatcgtctgaagccttcttctctcagctcgtcaaagtcattctccatcgagctttgttccgttgatggtgaggagctgcgttcctttggaggaggagaggcgctctgatttttagaattttcagtttttctgctctgttttttccccatctttgtggttttatctacctttggtgtttgatgatggtgacgtacagatggggttttggtgtggctgtcctttctgtttgttagttttccttctaactgtcagaaccctcagctgcaggtctgttggagttttctggaggtccactccagaccctgtttgcctgggtaatcttcaatacctgtttgcctgggtttgtgggttcagcagcggaggctgcagaacagcgaatattgctgaacagcaaatgttgctgtctgatcattcctctggatgtttcatctcagaggggtacctggccgtgtgaggtgtcagtctgcccctactggggggtgcatcccagttaggctactcgggggtcagggacccacttgaggaggcagtctgtctgttctcagatctcaaactccgtgctgggagaaccactactctcttcaaagctcagttggaaacgcagaaatcacccatcttctgcgtcactcacgctgggagctttagactggagttgttcctattcggccatcttggaacccccaattcaaactcagtatgtcttttggtggtccacattttattctttctacttttctgtgttttccaagtttacagtcatgcacatgcagagcttctgaaatggaaagatgatatgtcctttgcacagtactgtggggaatgattgagaacatggagttacagagaggcttgggcttgaattagagcccagtcacgtagaaggtttgtggcttggggaaggtcattaaattctcttattgtcaggttccccagctgggaaatggggacatatcacacttaataggcaggttttttttttgagagtgtgtttaatttactgaaattaatggcacataataggggctctgtatttattgaaaatgattgaacatatatattttttgagacaaagtcttggtttgtcacccaggctggagtgcagtggcacagtcatagctaactgtggcctcgaactcctgggcacaagtgatcatcccatctcagccccctgagtagctgggactacagctgctcagtcaccacttcctgctatttttttttttttgagaattggggtctcactatgatgcccaggcagtcctcagaatcctgagctcaagcagttttcccacctcagcctctcaaatagctaggactacaggtgcacaccaccacatctggctaatttttattttttattttgttgtagagttgggggtcttgctttgtcgcccaggctggcctcaaactcctggcctgaagccatcctcctgccttggcctcccaaatgattgaattcttattagtcaaataatatctggaggaggataggggaggcaacttccattctcaacttccactcactcatctagtgtgtatttgttaagtgtctaccatgtgcaagaagtagaggtaagggaatgtgtcattaacattagcctcatgagacataacaaactgagggagaaaaatcaggctatgtaattgacagaataaaaagtggagtaaaatgaaaaactatatgtccgatttttaaagtttttattcatttatccttcataggagccctttgaaattggaatgattttcaatccactttgacggatgaggcccgaaaagtcaaggcctttgtatgagatcctacagtgataaaggtagggctgggcttctgtctcagaccagtgggatgttaaggcgacacatcaagccccctcccaacctacaacagaaaggctctctttgaccatgtgcttcccaccatggcgggacacctgggccccatttcctatcaggatttcctctcggggagtatgaacccatctccagcgagtcctttccccgtggcagctgatgtctttttatttgggggaaggcaagggcttcattgctcaggggcagtgaagaacttccagaattggggacttggtagtgagggctgagagagaacaacttggaacacatctgggtgaagacttttaaaaactgtgatacctgggagaagaatggctgtctctgataatgaacacaaactctggcgtgcatggtgtgtggattctcaccctgctagcagttggcgaggtcctggaccccatgacccatctaatacttattcagcagatgtttagtagagctttggaggccacccagcctggtgctaggcttaggctggagggtaaaggatgtcctcatgggccatttaaagagacaagacacgtacatattgaagattttcggctaaaaactcagcgtcatggaaccaggatcaggaaaggggaaacttggcagggccctccctttccatcagatccagtgccttcactttacagatggacaatttgaagacctatagaggaaaagtgactttaccaaggccacacaaccatgttaatccactgttggttcaggataaagtaaatcagggcaggcttttggaggtgagctacctgctatacctggaaaccacggcttagagctttgaagcaaaataattcattcaacaaacatttcctagatgcttcctggggccaggtcctctgttggactctggggatataaaggtgaggaaaatgaaggattccctcaaggtgccccagaatactcaggggacagagatacaaaaatatgggtgattacagggcagtaagtagtactcttggcaacaggcaggagcctggggagtctggaaggtaaacctgggattgtaaaatgatggatgagttagttaccaagcaggcctgaaggaagggcatcactggcagtgggaacatcgcaggcaaaagaccagaatctttggcgagcatggctctccggggcactgacaagacaattctaatggccaaaatagagttcttgcagataaataatggggccaactcatgaaatggccaagcctaggcaagggttgaaagatggggattctactttcaaggaaggattggaatctgagtcaagagacatctgtggattaataactcgtgtaccaagggccacagacaaagttgattcagaggaaaagacctctgtgggcatctgagaaggcttcctggaggaggtggcatggaaggaagtgttggatttgtatatgagtagctagaggagatggtagcatggaagaaagtgttggatttgtatatgaggagctagaggagatggaattctgagaaagataaaagggcaggcaaggttcagagatgggaatctgcagggcacactgagtagctctttttgacagagcatcacaacaagtatgaaactggatcacaggaggccttgaactttggcttcaagaaaccacactttattctttagagtgcagttcaaccacttcagtagggagccaccaagggtgtctaagtgagggtggagcaggtttagggatgcctgtaaagtctgactttccagaatgtctcaattgcctgaaatataactgaactctcatcagggtagagagaaacagcaactttgcaaagttaaaaaagaagagaagtgaatcctcatggctaatgagaggatggaggtgggccaggacgaggcgaattgttccttcaaagccactttgccttggctgttgggaatgacttctttaatgcatcatcaaccttttctgagtagtccacaacccctgcagagcagcctgggcccaaagcaaggggaggattaactaaatgtatttgctgcatggggctctggagagagagggctccgggcaagaccttgtctctgacctgggagagccagtaccgagaggaggtcaaataaagatgcttgcccactcagacaacccagagagtgcaacggcaggggaaaacctggtaagtgagatccctttgtgggcttctaggtgactggacctgggggggtggaagggtggaattatcagagggatgcaggcctaggttgaccaataatttcagttttagaattgaaagtctcacttccccaaagaccctcagtcatgagcaagccaggatggttggtcactgtagaggcaacacccagaggcaatagaaaataagtgattgtgcctgaggtcaggagttcgagatcatcctgaccaacatggagaaaccccgtttctactaaaaatacaaaattagctgggcatggtggtgcatgcctgtaatctcagctactcaggaggctgaggcaggagaattgcttgaacctgggaggcagaggttgcagtaagaaagctgagactgtgctattgcctgggcaacaagagcgaaactccatctcaaaacaaaacaaaacaaaacaaaacaaaacaaaacaaacccaaaataagtgattgtgaatttaagcagttgcaactcagtgccaagccctaaattggtaaatatattggcatacaattatttacagttttcttatatcaccctttgtacacatggagtctgtgctgtgttgcctctctcacttttaatgataacttgtgctttttctttttctgatcattctggttagaggtttatcaattttattaatatcaaaaaaaatcttttggcctccttgtttttctctattgtttttctatttcattgatttcggctgcaatcatcatcattttccttgccatgcttagtgttggctcaatttgctcttctttttttttagttttttaatgcagaagctgaggtcatgatttaagacttttcttcttttcctaatataggtatttaattctgtaaatttacctgttggtattgtgctactggcagcacataaatttttatatgataggttttcattttaacctcttcaaaattctttttaatttcacttttgatttcttctttcatccatggattatttagaagtgtgttattttgcttctgaatatttggagattttccagctatctttctgttattgttttaacttaatttcattatgatcacaggacatactttctatgacttgaatccttttgaatgtattgaggcttgttttatggcccagaatatggtctatcttggtaagcgtgctgtgtgtactcgtaaagaatgtgtattttgctattgttctgtggagtgctgtataagccatcattgggtcaacttggttgagagtgttgttcaaatcttctatatccttgctggttttctgtctacttgtcctatcaattattgagagaggggttttgaagtctccaggcataattgtggatttgttgatttttttttgcagttctatcagtttttgctttctgtattttgaaactctgctattaggtgcataaatatttaggtttgctctgtcctcttggtgacttgacctttttatgattatgaaatgaccttctttgtccctggtgatattatttgttctgaatcatattttgtctgatattagcatagccatttcaactttgtttttgatcagtgtaagtatggtatatatgtttccatcctttaaaaaaaactatttttacctttatatttaaaatacattttttctgggtaaccagcatatagttgaaactttctttttttaatccagtttggcaattccttaaattgttgtggttaaaccatttgcattaaatgtgattattgatgtgttagatttaagcctattattttgttatatgtgttctactagtcccatttttttctcttttctcccttccctcattttctgcctccaactgcagtaaatgaagataaaatattttggactaaaattggacatttttgtgatttcatttataccctttgttggattataagctaaaacttttcagtttgctcttttagtggctgttgtagagtttatatataaatctttaagtcatcatagtctaccttcaagtatagcacttcaggcagagtagaagaattttccaatggtattctcccattttttccatcttgtcctttacgatattgctgtcatttattttacttatacatatgttataaagttcataatatgttgttattatttaagcattcaactatcttttaagtaaatgtaaataacaaggaaaatatatttaccattgtagttataggttggtgcaaaagtaaccacagttttcgccattactttttttttttttttgagacagagtctcgctctgtcacccaggctggagtcagtggtgtgatgtcagctcactgcaacttctgcctcccgggttcaagcaattctcctgccttagcctcccgagtagctgggactacaggtgtgcatcaccatgtccagctaatttttacatttttagtagagacagggtttcaccatgttggccagtatggtctcgatctcttgaccttgtgatccgcccacctcagcctcccaaagtgctgggattacaggtgtgagccaccacgcccagccttttgccactactttgaatgacaaaaaccacaattaatacaatttctggtgctcctcattccttttgtgtgaacccatatttccatctgatgtcaatttccttttccttgaagaaaaatctcttggaatacagatctgctggtgatagatatgctggagtaaggatctgctggctcttctgcttttatatgtctgagaagacttattttgcttaatttttggaggcatttttactagatatagatttttagattgacagcttttttttttcttccaatacttgacagatattgctccactgtcttctctgttgcattgtttctggtgaggaatctactgtcttccttatctttattcctctgtaggtaatgagttatttttctctggacgcttttaacattttcttttataactggctttgagcaatttcggtatgactttgctgtagttttcttcatgtttcttgtgcttggggttctttgaacttttttatgtggatttataattttcataaaatttggaaaggatttggccatcattttataaaatttttgtttctgccctcccacctgccccatacttcttgaaacactctaaataccagtatgttaggccactggaagttgtctcattgctacattcttcattttaaaaatccttgtttttctatttcatttcaatctcctcaagttaactaatcttttcctctgcaatgtttaatttgctgttcatcttatccagtgtatttttaaaatcaaagccattgtagtttttaatctctagaagttcaacttggctttttaacaaatgtattccatgtccatcctttgaacttatgagatttagctataaatgttttaatgtccttgctggcaatttctaatatgtgttcattctgggttattttaattgattaattattctcatcataggtcatattttcctgcttctttgcatgccaatcatggatgccagacatcatgattggatgccagatgtcatgaattttaacatgttgggtattgaattttttatatccctataaatattcttgagctttgttctggaacacatttaagttacttagaaagagtttgacccatttgggttttgcttgaagatttgttaggcagaaacaaagcagcttttagtttagggctaattatttcctgttactgatgcaagacccttgtggatactttaccaagtgttccatgaattatgagggtttccagtttgactagtaggaataggcactattcccagctctgtgtgagtgctgccaggcactgtttcctctcatcttctcaaatcattctttctctggttttgggtagttttctcacatgcctaccccaatgaggaatatgctgaattttcaaggaggatttttcagatctctggagttctgtctctgtgaagtcctctcctctctggtgctctgtcctgtgaactctggttgtctcggtctttctggactcatagctctgtgtccttgactcagggagtcactgggctcaacctgggtccccctccctgtgcagggctggaaagtctttcaagggcataagctggggcaatcatagtgctcacctttgcttatttctcatctctttggggtcaccatcccttgttgcctaatattcaatgtcttgaataattgtttttcatatattttgtttttggtgttactgttgagggtaagtccacaagctgtacctacatcttggctggaagcagaagtctctgaagtggaagcagaagcctccactgccatcattcgtccaggccatctcaataacaggctaattttaataccaataacaataacactaaatgccattccaaagtaaagagtagacttgtatcaggtggcccatctctactacgtgtcattgcttctccattcagaaaagagtgacatagctgcttcacaactgaagtactttcatagctattgccaaatctgatcctctcaacagccaggtgacgtacgtaggcaggcattcggccatttgacggggagagagtttgaggtccaaagaggtatagtgatctgctcatggctacctagacagcaaatgggagtcagaactataaccaggacctctgtcctagactctagggatggatttgctgcttcctctctcctgcacatcaaggcaccaggcaggggccttagctttcactcctgatcaataatgagacattcatttccccactgggaagaaggaggatgagtaatccactccccctgctagaaaacacaaggggaagtgatgcagcaatcaacgccatcccaggcgagcctctgtgctgcctggattcacggcacgcagggcacaatgctgtatttttctgaccattgccatggtgtgtggacaaaatatgagcacgtttccttggaaaacttcaacagtgactcaccctcatttctaccgggatcagttgaagaatgggcaagctggtagttggggggagggaatagccgggagcaaaatcaggacacagataacagcaatgtttgctacctgtcagcaagtgggttgctaatgcaaagtggtttcttaaaagcttggaaaataaaaacaacagccattacattcaaagagaagttagcattagaaaacgatgtgtagctctgaaatgaattctctttaatcaaggatctcattttctcttggttaccaaaagttctgtccacatggagtggtcagaaggctctggtccctttgctggcctgcgagctcagaagcagcatggggtggtgaaaagagcacaggctttggaatctgaaaggtcggggtttgaattgtatctctcccttaccaagccttagtttccccatgtataagatgggcacagggaagcctatcttgcaaggtggctgtgatgaggcagcctggataaaggagctggtgcacggtgctcactcattgcgaccatcacaatggggatcccgagagactaagaacagggaacaatggggttgataatggcagctccactcagtgaaccgtgatggaatgctaagactcatttacagagacgtcctcatggcaggagaagatgtttatgggaaacaatgttgagggacaaatggagaaaacaatatcaaaatccaatggacaaactgggctagagatgatcatcggaagctgctttacccagaaccctactgaaggggcccagccgctatgggctgtgggtaaggggaggttttgaggaagtggaaccttgtgtaagcagggttaggagtcctgccaacagagggacagaagagggagaggggagagaggacaagggagagggatctgaggagagagaacaacagagagaatagctccttagctctcagtcttagtaccagcaggtgtgtgtgtttgctttccagtgagctcttcccagccttcagtaaccactgcctttggctctagcctccgaggctctctgctccttgtatccccaggagccctaactgaggcagaaacagagagttatatagagagaaaattgcaaggaaagataccaaaagcataaccattactttcaatagatggaggtgctatgggttatgtttttctatttttgtttcctccctggcattttctacagtagccatatagtaaaatcttcaaggaaaaataaaacaaaagcatggtccacaggcctctggggctgctgttgcccaccctcccttctgtgttggccctgccccttgtcataccctctccatgccttttttggaggtgctgtgtgcctttgctggttgcaggtctgagtggtcctcctcccctttccccaggcctggtaatttccacttcgatttgctgagctgaccttccttcccgagcacctggggttcctcacggcatctgcccaggagaaggcctttgggttccatgtctaggttcctctatctctgagttcctcagagcttgccttgttctcctgggcagaataaaagcagaacacctgagggcaactgcaggcagtattgctcaatggttagagccaggcgttggtgcaagctgattccaattctaggctgtatcactttctagctgtgtgtcctttagcaggtttcttaacctctcagtgctccagttgtattttctgtaagatgatctccagtcattgctacctaattagatttgggaggtacacctgagatactgggtatgctgcatttagaaaggttctggactttatagataagactttcaaggaattgtaccagttatgatggtgagcgtggtggctccactcaatgaactatgatggcatgcaaagatggatgttacagaggcctcctcatgacaggtctgatatcagttatgattccttgaaagtcttccgcagagtgaggtcacctccactgccatgtcccctctgagaggtggtaatatggtttggctgtgtccccacccaaatttcatcttgaattgtaactcccacaattcccatgtgttgtgggagggactaggtgggaggtaattgaatcatgggagcggtttcctccatactgttctcatggtagtgaataaggctcatgagatctgatggttttataaggggtttccccttttgcttggctctcattctctcttgtctgccgccacgtaagacatgccttttaccttctgtcatgattgtgaggcctccctagacacatggaaatgtgagtcccttaaacctttttctttataaagtacccactctcgggtatgtctttatcagcagtgagaaatggactaatacaggtgggaagccctgcttgtccttctcctcactgaggttctgaatatagctaagcccagattcctctccctgctctgccatcagtaagcaccagaaatgtgttcaggaaaggggcgagacagtcttcattatcaccctttcaggtcacagaagcagctgcctcagtgatgaggctgttttgatgcttgacatcagggcagcctgacaccccaggtaaaatcccctcccctgctggtctgctccttctgctggttcccaccaggccttctgggggaaacttgggggctcacttcaattccacaaacaccagctgagcccctactatgtcctgagcactgggacaggtgctgggcatggataggagttaagtctccttcccagtgtcagacacagaacaagcaaaaggcatggaagtgaaggacccattgtctttacagtggagaagggagaagtgacttcctaaaactgagagcaggacatcccagtggtacagcccagaaactgagggcattgagtagggaagaggagaatgtgattttaggagctaaggaacagttaaaaacggctgtcaatctaatgcaactaatcaatccaattcaaattaattgaatctcatctaatcccctgagctaattaaatccatcctacatggatggaagaatagcatggtgactggcactgctagaacctatgccctgccctcttcaatgatttgggggaactgtggtctctaatcccaggtaatttaaaaaaaaaattctaacttcaaaaacagacaaaaatctttcaaacgttgcttttccaaaaagggaaacttctgagccataggcctcttgctatgtccttgcaagtgctaggagcagaagtagggtctgatggaggctgtccactaaggaaggtattacaggggcagtccgggtaggaggctgtgcctggctacacggagcaggctggacccctcctcctttatgtgagcctgtctgtctattaggagtcgggtccaaaccataaaacatatttgtaaatagctgcattatgcacatccttaaaaactgcacaattaatatatgaatacataaattcacacttataaatatgccagggatccagtaaaaatgaagaatcttcctgcacactcaattgtgttctcttcctctgagcagctctcagtatggtaggcaccactctagactttttctgtgtgctgatatgcatacatgcacatttataatcatatagtttagggtgtgggtatttttaatacaaacgggaccaccttgtatgtattgttccgcaatttgatttttcacctaccaatatgtcttagaaattttccccaagggatctccaaatcttccttacccagtttaactgttgcagggggtgggggaaatgcataggcatcttccctcctcagtataatcatccttctattgatgaacatttaagttgtgtctaaatttctgctcatacaaacagtgctgcaggaaagatctttatctatgttgtttggtgtacatgagtatgtatttctttagggcagattctaagaagtaaaactgccaggttgaagggaatgcatgcttttttattttatggatgtgttgtgccacatccccacccatctccccagcccagaggctctaccagtttatattcccctcaacagctgtcccagctgccctctctaagagatgggtggcttctttgctgagatgcagctccccttctgcttgtcccttctgtggtccccttggctctcctgcagaccttggcccaaggccatcttcctgtcctttgtcacccaaatgcatcaaaggccctattttaagaactctgagtactatttcaaaacacacagcacataaatcgggagtgatgactctcatttcagaatgatttcttcttccacaagaggatctgcttcagggtttggagcaattgatgaaccaatattgattatgcctgccatttattcattcattgatttacagtgttaggcttgtgctagctgctgcagaacccttgccttcaaagggtattctctcattggatggagcaagacatgcaaataacttacgttattaggtaaagttatattaatagacaattgactgctattaaaacattttaattactcaaagagggagagagagagggagagagacagagagtgaaagatctcagtaggtgagggaccagaggtattttggggatggagcagtctaacagataagcagtatgatttactagcccacagagaatgattactgggggctgtccagcccgtttgtcacaacataaacaaatgcagggacttctccagttgtgatggctgggcaatagttgttttcaagcctgaaggaggaggggagaacaggaaagaggtgtctttttcagacccctccttcccttacccttgtcaagggagtgtgacagtcagcaagactgttcatattcagtcattcattatagttgatatttctaaaagacgtgttggtgattctttaaacttctcagttgccaagaaaaagatgcaacagcttttggcctatgcatggaagtgtcctctataggccctttttccccctttaaaaaaaagtcagaaaccaaggccacaccatttggagttcagacagtgaactgcccatgaatcaaaagataacgtgacactgggcagcaggaccaaccaaagcatggtctgatttattaacttgtcccctgagtaagataaagtaggtgagtccatagacattagggctcctttcttctgcctgggtccaaggaggaaataagccaccgagagataagcagccagcttttgatgtcagatccagtgctgagtgggtgcaggagcagccagttctccctggagatgctagtgagggtgggcaccaccaagggtctgcaccatggacccaggctggggctgccatgtcagcaccatttctagcttatcctttcttccaggtctcaataaaaagacttattttttagttcctagtgttcaaagagtatttaagttacaccatatctgaaggctaagaatttaaatggacagtaaattatttaagttagccctcagagatcattgcacaatattcgatccatccttcattccatctaagaactgtaagacctaatcttttcccgtaagagtttacagtatactgggggcatgctaccagacaaataatagctcttttagttgattgattgattgtagaaatggtgtcttgctatgttgcccaggctggtctccaactcctgattctccctcttcagcttcccaaagtgctaggattataagtatgagccaccacacccagccagctatagcccttactccatgattgattggttgattgattggctacctctcctgctggcctgtaagctctaagaagaaccaggctagtcttgtccactggtaacctaacacctaacacagtgcctggcacatagtaggtgatcaataaatgtcaatatgagatgatgagagagtaggacaggaagaaggctcaaggcctaagtggggcagtgtgtagatgagagggggctgtgtgctggagggcagtgagatataatcactgggaaaagtgatggtgggagcccggaggtagaatttgggctttattttatgggttgggaaagacattaatgggtctcaagcaggctgtgacatgataaagtcctctctctcacatttatttattcgttcatttcatccaatgcaatttattgaacatcttgtatatgtaaggcaccatgtaaaatatgaagaatagaagtatgatagaatcatatccccaaagaattcccagtttggcaggggagatagataagtaaacagacggttataatgtgtacattttatgctggagatttccacataatactctggtatggccatgtttgcactgaatcttggaggaaggacacatacaagtgaggtgatgaaagggtgggaagggtgttgctggcagagggagaaaggagagagtgtgcgatgctgggaggagggctctgtttaatgtggctggggtgttgtgtgggaggctgggggagtagagtgagaggccactgaaagagaggcaggagccagactggagaggtctgtgaagagattcttggacttcatcctgtggttcatgagggagggagatgagcagggctgtattttagaacggtcatgttgttgcagagaatgggttggggagggacagagtgagcactggggaggccagtgaggcagttgttgttcttatctgggtgaaaaaaacataaggaactgaactaaagtagtgtctggggtgggggataataacagctagcatcatttgggcacttacggtatgccaactgttctatgggtattacatgtatgaacccacttagttttccggtccccctgtgaggtaggaaccagcattatccccattttgcagatgaagagaatgaggaacaaggttccacaactagcaaatggggatttgcactccggccatttacagagttttgaatctaggggagcatcaattatggggtgcaggtgtggggacagggagaagatgaatttagttttgcctgttgatttgggatgtccatgggactctaagcgaggagttcagcagcccctggaatgttgggtctggagctcaggaaagaggtccaggctggggtggcagtctgggaattatgggaaaggatgctgtaacctgggagaggacaatacagcaacctggagtaccactaggtaaggggtggcaggggaagaattgcttatgaagggggccaaggcagagtgggcagggaggtgaaaggaagccaggcaggagtgaagaggagtgtctcagggagggtgtggtccacagtccacatgctgttcagaaaccaggtggcataaagactgaggagtgtccctgtcaacagaggctgggtttagccaaagagatctcatgagcaaccttgacaaagaaaagtttcagtggtgtgctggaggtggactggcaagaaaaagggaaatgaagaatcagggataagcgagtactgcaggccccccttatccacggggatacgttccaagaccaccagtggatgcctgaaactgcagatagtacccaccccatatgtatcatgtttttttttcctatatatacatacatacatacatacctctgataaagtttaatttataaattaggcacagtaagagataaacaaaaataactaataacaaaacagaacaattataacaatatgccagcatcatgactcttgctccttggggccatgattaagtaaaataagggtgacttgaacacaagcactgccataccttgatggtaaatctgatcacagacacggctgctaagtgaccagcaggcgggcagtgtatgtatgcagcgtggatatgctggacaaagggctgattcacgtcctgggtgggatgaagtgggatggtgcgagatttcatcacgctgttcagaatggtgcacaactgaaaactgattatttctggaattttccatttaatgttttcaggctgcagttgactgtgtgtaactgacatcagggaccgagaactttttggtgactctttgtcaggaaggcaaggagaggaagaggctgcaaggtagtggggaggtaaaataaagaataattttatctcctcctaagactggagtatatttttatgggattcagtttttgattccccaacagtgctaagcacaatacctagctcatcctagccaatcagcaattctttgaagaatccttctaattcctccctcatcctctgctgtcaagtccaccttgagaaaatcaagcttatattgtgcaggaaaaaatggtgaaaacttgactcttggcaaaatcgtctggggatctgaagatattactactttagatgctgagtggcaacaagtgattaagtagctaaactagcatatgcttaattgattcttattcttgggctattcatgggaaacagtgtaccctgttgatggtgaaggcaatgtctacacagcgggccatctcaccttgtggcacctctccagtgctttgatggggtggaaatagatgcttccatatttatgcggctccatctttggccatttggaagtcactaaagtcatgtgtaataaattctctcttctgccttgaaaaaaaccaactgggcaagcttccatttctaatggggtccatgaaacatggatattaaggaccatggatctggctgtcagattgacaaatgagtcttcccttttgaaaggcacttaggaagttataattggaagcttgagaggagttgtcaaaagcaggcagtgggcatcccaccaagctgctgggcctttttatttaggggtggggtgagggatactgtttcttcttgtgagccatggtgggattcccttcaaatggtggaaatgtggccaacttataccagaggcagaggcttaggcttctgtaggagccaactggtcctgccaaagacctaactagagctggcaagacctaagtattcttatttgcctttattgtagtctaaacaggctagagaggcagtggttagatgcaaggtgttgtgtgatggtaggcattctcagggcactttagatacagctcaagtgatataaagtctaggttgtggaatggaaacccttctcattcctgatggtttccagctggtagtgaaagaggttcttggtgacagtgggaagtctctgggaagggacattcaaccctggctccccaaggtgtttctgaggctgtcaaatataaacccagggccaagatttccaggaaatttcccgaacaataacgttggtgggccaactaattgcccagaatctctagattcattcccaggaccaccaagaagtataagcaaagtggttgaataaatatttgatgaatacatggatcaacacttagaaaacaagaatcaccaccaggctctttgaagagagggtgggagatgatgaaaggcttctgatatcaaatcatgacttggaagtccaggcatggtggcttacacctataatcctagcactttggaaggcagaggtgggtggatcacttgaggccaggagttcgagaccagtctggtcaaagtggtgaaaccacgtctctactaaaaatacaaaaattagccaggcatggtggcacaagcctgtaattccagctattccagaggctgaggcacgagatttgcttgaactcaggaggtggaggttgcagtgagcagagattgcaccactgcactccaccctgggcgacagagtgagactctgtctccaaaaataaataaataaataaataaataaataaataaataaataaataatcatggtttgagcaaagagtctgattggtgatgtcaacgttgaagacagcttggtgctgtccccataccgcatgaatatcccagctttgcagtttcacatatatttactcactcatttaattttccccgaattccagaattctgtgctggctctcttatctgttcatccactcttatctacacagatggcttccagatctatatccctagccctgacccctttcatgagcttttgctttgattagcttgtctaagccagaaacgatatgaatatatcatccatcacagcccagcttcataacctcagggagacgggctttcagggcagatttttaatgggacagttggcagaggtgagttaaggaggcagcagggagcattagagtataacattggattgattatccagttgtacttccaacaactcacatttatggatcttatctataagcaaggcactggggccacagaatccaaaagacacaatccttgctctcagagggctctgagactataagagacaagggctgagagaggcaaaagaaggcagttctggagaggtaggtgtcaggagcagtgatccacatgaagtaagcctacatgggactgttgtacccttggaagtgtgacaaaaaatgccaaatcccccacttcattctgtgagtgctccaagacaggggccaggtctcgcttatcttaatttttccagcacattcagtgctcagggaatatttgctgagggaataaatgaatgtacaaaatattgtatggagcagctaactattcctaggaaggtggcaggataagacagcaaagtcttcttaaaggccatgacctttgggtggtatctggaggtgtgaataggcctttgccaggtagatgaaacaaggaagggcagatggaacagagggagcagatgcacagaggctgccatcaaagaacatggggtgtttggtggatggttctgcatcattgggatgtagggtccatcctagtcaaccacaggcagatgaggaggttggagaggtgagctgtggccaggctaggcagggactccagagccattctaaggggtttagatttttgtaagttacagaaagccctggaatgtaagggtgttatgttgggtagtgctgtgaccactgaggatgtgggttgaggaaggggtactaccaaggagggtggccagagcctctctcctagagttttaggctactccaccccagctcctgcttctcactagcaggagcccagattctgcctcccagagctggggagagggtttatctcacatccttgtcataatttaccttataagcatcccatgccagctggcagagccgggagtgggtgcagaactgctgtcagccaaacttcctggtgatccttatgtccttgagtgagcaggggcagggactcccaggtggtgaatgctagaggtcatttgaagtcatctcatggaatcttctcattttacagatggaaaaactgaggcccagagagggcagtgacctatccaaagtcccatgacacagcaggactagaatccaggcctctggactcctaggctgatttgttctccacagtactgagtagccttatttctttgggctcatggtaggaaaagaccagcctgccagccagtccctccctggattagctccctgtgcgctctctccagagagtcttcctgagttacaactgtgcagtgtggcagagcagaaagagcatgggtgcgggaacctggtagattcgggcttgaagcccaaccctgctgctcccctagctacgcaaccttgaacaagttattcaaccacgcagttttgtcatctgcaaagtggagatatcagaaccccccctgcagggttgttgtgggagattaaatgagataatgtgcctcaagtgtccctacagcataatgcctggcaggtagcatgtgctccattgataggaactgttgttattcttctacccttcccagggttctatttctccttccagcatattatcccgctgcctgtctctggtggtcctgggattgtgcagaggattttacagcaactgagttaaccagggcacttcttaaggttgtctaggaaggcagccaaggcataccttgacttatttgtttttagggcaaatgcaggttaagaaagcaatctttggactgggttgtagcccaagagtatattctttaggacaataaaataaaatttaaaacatttggaaaggcgtggtgtgtgtgtaattatgcatgggtgagataattttcaccatgcagaaagactttcccatttatacaaagattcatggtaggacttctttaagtcactagttcctcttagggctcttactctggagtcaattttcctagcatgattcacaccaactttccaggaaagggctttctacttcctacgacttgtccccatggccttcctgcaaagtttccttaaactttgagccaaagcagcagaatcttggattgatagcaacgtagctgccacattttatggatataccatatactataagatgcaccatgattttatgtatcaccaagaaagaataacaaacactgcttattgtaattttaagacttaattgattgtaaaacgaatccttatttcagaaatgttaaaatgtgaacacaaatatgcctcttaacaatcaatgaaatgaagtgtttgaggaccaggatcaactggatagatttgcatactcacagaatgagagcatacagctggggctaaatcctcaaaatatacttggcttaacattatttttgcctttgttaaagaaaccgctaatctacaggctctgtgagggcagagactgcgtctcttttgtttaccactgtatctctaccacttcactcatagtaggtattcagcaaatatttgctgtatgaataaatagaacaaagccacaacatgaaagagatggaaagcccacagaagaaaataaattattcataattcccccagtgtgggtattttggctgatttccttcaagtcttatttcctatgaatatgctcttttatatacatgtaaatataatgtattattagatttagctctgggatgtgtttttgtatttctctattaatataaatgaaatgatgaaatgagatgatgcggaaatgctttgaagactgtaaaatgtttaacaaatatcttattagttataataatcatgaaaatacagacatgaatggggctgattttctgagaatacacttcaaagctaacagcaaatttgccctccgaagctgggaatatgttctatttcctcatcctactcaccatagggagtccttctgtttcatattgggaagggaaagagaaacttaaggattcctagaagtcatagctccgacttcccacccagcccagaaatttcttccatcttactaatggaagatcagccagggctaggggaggaaaaagcacatctctcaggctgatgaaaaatagcagcctacagagaacttcctcctctccaccccttactagtggtggggagaagttacacactggattccaaggaatgttgttcacttattctgctgctaataacaatgtagatagcaaagagatgtcaacacaagtaagtaattcatcatagtaggggtaggtacattcaacaagccacaaagtcagatttgccatggacaactaattaacaatttacttttagaaagtcacagaatttatacacatattgatgagtctaacctgttcctggttctttgaagggatgtgggtttactcatacaacagaagggagtgctgaccgattttctctccttgaccagactctagccaggctcttctgagccctcttctcttctaagcctcacccttagttggcctatgaagacttgaacaaacactatcatagtttctaacagcccaaggtcatatccctagaatacctctatcccctcttaaagtgcctgcctgagaaaactcgaggctgccaagagaatttactctttgctccagccaacacctgaatatagggcccctgtctccccgtctctgtgggagggtaggagcctaactaacttcaataagcaccagttagcaaacccagatgcttttcacagggaccagcacccaagccccttcctgttttttatgatttttttacttctctgactctgctgctcaagcccttgctgttgcctctgcccactccctcattctctctttgaaacacccaggccctctctatgaattggggttgagttcagttcatgctgcaccctcttccctactgcaaaagtaaataattgattaaaatctgccctcaccatgtcaacccatgtccagctttgtttacttttgacagtactgaggagctcacctaggctagtagctcaggctctcagctcacccaggctgcctgtccatctgcatgtctttactggataatccttgttctcactcttcttgactctcaaatccttagccttgaactttgcccctgccatcctcatgccctcctttgtcctcaaggatatattttcctggttgcaccatttggtttctaccttgcatacccttggatattcccttttctgcttgcatcacttgtctcagtttctgggatcccatagaggccaggctaaccttccagcacctcctgctcctgcatcaaagctgcaatcccattccctatgtgcttcagtgaaggttgaccttggacttcattaactgcccaggcattgggtacagggcacagtttgtgaggcctatgccatcaacactttcccagagagtaaaaaacaatatagctcacgtatagatttacaaccagtgttttttttttttttttttttgagacagggtctagctctgtctcctaggcttgagggcagtggtgcaatctcagctcagtcagctcaagtgatcctcccacctccaaccgcccaagtagctgggatcacaggcatgcactaccatgcctaatttttttttttttggtagagataaggtctcataatgttgcccaggctggtcttgaatttctgggctcaaggaattctcctgccttggcctcccaaagtgctgggattacaggcgtgaaccaccgtgcccggccctacaacaagtttttaatgcagaatatcattttataaaatggctaaacagctgtgatcagtaccagatgaaagatgacatttgagccaaattttaaaagcaagctgagctcatccattacgtgcatgtatccttccttgctcctccgtcatggttctccctgagtctccctttcccacaccccagagcaggtgccttcactactcactgacttagctatgcctaaggtcttccccagaaacttgtcttagatgatctggtttaggattccctcccagtcactgtctctccagtttttattctaggaaaaccaggcaacaagtattcaggagataaaagaaagaaacggagtccgtgtctctccgcagtcctgctttgagactgcctccttactgagagtttgcgaaggtctcccttttgagatgtaagactcgcttcagacgtgaggctgtgcctgtcctccctccacccacagacagaattgatgcagcagtcccagctggccagctgaggtcccctccccagcgctatatcaaagagagcaggcaggatcccatgtaacaagggctcgctccacttaaactctgtgatgggagagggacgcctccaccccttttctttttgtaggctgctttgaattgtattaacgcaagtgatgaaacatatcaagccctggttagcagttttccttagcatcccctggccaaaaaaaaaaaattttttttaaattaacttgtacaaaaagtcaactgtaacagaatgttctggaaaagaaaaaacccaaccagtttggtgaaaagaaaaatgagctgggtttccttcatgcccaattttagggaacaacaggtggtacaggagaactggtgacgaaggttagccaacatctttctctagtttcacagtaaagcccttgaccgagtgggaattccatttctcctccttgtgcctctgcagggggtcgggggaggctgaggaccatcaatcctgggagcccagggaacttaccctctgctcctgtgtggccacaaaggtctggaaccctggagccaccccaaagcccagctcttggatgaaaggtggctcagactgactgtggatctgaactttcactcctgcttcaaatgtcgtttcctctgaaagaacaaagatggacagagccacgggtcagtaacaacagatgctcatggagtcctgggattgaaaagctcaaagggatgctgaaaagaccctgtgataagcagaataatggcccccaaaggtgtccacatccccacctccagaaactgtgactaggttgccttacatggcaaaagggacattgcaggtgtgattgagttaaagttcttgagacggagagactaccctaaattatgcaagtaggacccaatgtaatcacagaggttcctatgaaagggaggcaggaggatcaaggtcagagagagaatggaaaaatgctatgcttctagctttgaagacagaggaaggagccatgagcccagggatgcaggtagcttctagaagcaggaaaaggcaggggaatgaattttcccctagagctgccaaaaggaacacagccctgccaacaaccttgattttattgagcctagggaaatccattttggacttctgacctccagaattttaagataacgaatttgtgttgttttcagccactaaatttgtggtaatctcttgcagcagcaatgggaaacaaattcaggtcagtttgccaggtcaactccttgcctcagttgccaaatctatagaatgagattataacataagtcaaactcctttattttattgattaacttttcttctgggtcatgaactgaaggtggggatatcaggaggaggaaaacatgatgcagcagtagaaataaaaatgcagggctttcttgtatgccaaggtgtttgccccttggggctgcaatggccaagtagaagagaaacttccctcattttttcctttggcagaagaaatggcccttggcagtgggaggttgggggcggtacagagccatcatcctaaatgtttagtgctcacaatcagtggaaaatgaacttatgggactgtataagcctttaccagatccccctctctgtcttgtcttctccaaacagtctacagaatgagctctccaaatgtaaactgtataactccctcccatgtttccaaggaccccaggctccttacccaccccttccctagccttgttctgagtagcctctgcctcgaggcaccatgcggggctgcctggattgggcatcactggtacccactctgcacaaatgcatctccttctgcccagaatgtctttctaccttgtccacctgaccatcttcccacttgtcactgaagattcagctctccatccccacccaaagcaactctttctcttgctctgttgtatcttccacatctgcctgctggagcccctgccatagcacatcgtgatgaggctttaactgtttcctccagcaggctggagtatcctgaggccaagttctgggctgtctctctggacctcaaaggtcctgcacatggctaggcatacaccaggcactcaggagatgcctaatgaatgaataaatgggagatttatgggtcaagcctcaatcatttatgaatggacaaggccaacctggaggccaaatcaaggaatgttctcaaagaaaaaaatggagagagaatggataaatgcaggaaggagagaagataatgatggggttgggggtcagggatggagagggggaggacatgtcagcactcaggctgtggcttggggagggtttggggacaaactaaagctggcacagaagagagtcactgggaaggaagggctgggtccagccacgggaaaggcatgacccatggaaagtgtgggggctattgactgaggtaggtgcaggggtctggagcagggcaagaattccaaggccaggggctacgtggaaagaaagggctagcaggcagacaggaccccagggaagggtaggcagggctttcatcatttagacaaggagaccctcagccaggaatccttttggatatggttcatggagtgggagagaatccaggcaatctacaaacacatcccacttccctccagtacagtcattgttctgtggtttctgtacagcatcaccctgtccaaactcctatccatatgctcctggaagcctgtggctttgtgtcaatctctcctattgatggtgaattcctcaagagagaccatattttattcagtccagggctccatcacctaacccagggcctggccctcaggtggaacctcaaggaaggtttttagatctgggaggaggacttcaggaaagggaggactggatggaatgagggggttgaatagtcatctttcagtggctgtgttttcaaaagtctgtccaagacgggggttgaggagagagtgtggagcctgaaaaacagactcagatggggaagaagggtgagtgtggagggctgttgggatgacagggatgcccctgctgggaggaactgaaggctccttcagtgagccgtgggagggaacaggagagatgccagaacttgttttcgagagctagctgaagccgtgtgtgcctgctatacaaccaagcttaagaaatcttacagccagtaagacaggctcaaaagagaggacctgtggtttacaggagaaatgagaaatgaaggcttcctgtcagaaatgccatgagtaatgggcaaaacatacaggcctggtgtgcctctcttagtgagaaccgcccaaggctaattgaactgggttcggatttggaagaggtgctagcttattctgaaagcagcagtagctgcagctgagagtaaaatcctaaagtagcctcagtttttaaaaacatccagtggctggatggacatgagtgggagcaggtgataggtaaggtttctgctctctttagagcactgcggaccagtggaactttctgcaaagatgggaacgtgctattccctgtgctgcccaacatggtaggtgccagttatgaaaggtggcttgtgtgactgaggaactgaatttttcattttatttaatgttaattaattaaaacttaagtttaaatagccccatgtggctagtggaaacattgctggatagcacagttctagaatatccagctatgagcagactacagccctcccagagctgagggggtgacgagaactccgccatcttgccttcctaagcaggtgctctggagatgcccttgtctggagtcctgggtagtttgggcagggttccgagcagcagatcagtgtgtcttcatggtcaaaccacgaccatagttccagatcctctaccctgctttccccaaagccctacttgtacatctacagatgcatttctttctatttcttaccagaattgcccttggcttccttttaaagattgctttccaggttggtagtgaagagcagctccctgcagtccctgccctcactctcttccctttcctgggcatggcacagtattgagttgaagacccaacttgagagctgaagtaacaaatgtagactgttagagccaaggcaacttcacaccatccactttggaggttcccaagctagaatgcaagttaaaatctcctagatggcttgggtgatgcttcctgggatccactcccagaaattctgattcagtcactctggagtggagagcaggaatctgcatttccagaaattctgatataggtctgaggtcatctacatttgggcagtgatctagtccagggaagggaagtgacttgcccaaggtcagacagcaagtcaagagcagagcaggggctagaagccaggtctcctgagttctaatgtggcactctttctactccaccaggagtgtggtttatttagtgtgagcagatgccttaattcatagctctggagttctgaatgggggctgagggcatgggatatctttttctttgtaatcacccctaatgtccctagcacagtagctggcacaaagcagggctcaataaatgtttgttgaatggaacaaatgagtgaggaagtatcccttgcttatgtctgctgttccctgctgtatctggtcagctgtgagcctgcctaggttctggaggacactggtaaacaccagcaccgcataattcaggagggctcacctgctggcatgcaggtggggctgcacacacaacaacaacacggcaacaataacagtaacaatatgactgcactcatagtttgtgggtcccagtgccaaatgaaaatgcaggaccccttgttaaaaaatgttgttaaaaatttataaaagtaagcattgttattaaaaaataaaagaatttcaagacagcaatctcaagagcattaaaccaagtgagtggcccttctgattgtgggccctgtgtgaccgccctgatagtagcatctcaaactggtgctggacagaattgttcacatcctcatatttgtcttattggcaactgattcaatgctaagctccttcaaagagtgtaggtctctggacagtgaatgatttgtttacacatcatgaacaccaggattcaaggacagaaagagagagagagagagagagagtgcagagagaaagggaaagctactacatacatactatgtagacagtatgtacatgggagttcttgttaattggtaccaagctgaaacgcagacagcgtaacatgaaagataatgctgaaccaagaggagtgtggtaagatggagttcagcctgcagaagccacagtctcccagcattttccaagagcttggccataggtggcacaaggtgagatctacctggccagggagggaagtgcattttctgaatatgcagaaaggacatgggagccctgtaggaggaggcaggagcaataggcagaatgcataacggggcagggaaagtgcatcacgataaaagaagctaaaatctttcatcttggcaaattacggaaaacatgccaaggaaataaacactggagagaagtaggaagaaaagtttatctgaatagctagggggagttttcagagctcagagagtgaacgtgctgatacaaagcaatcttgctttggacaaaaatgactttataacagtggctgagtgggggaaccctagctccccagatagcttcagaggagagggtgggacaatggccagccatataaggggcatctcacagtgcagcaagggccttgtgtgggtatgggatagcttctgtttgcacccccttcccagtgcttctccaccctgctctctgtgctacgggtttgacttgcagagactgtcttgatggactctgttgccctctggcttgggatcagttaatggtgggccaggtaggaaactggagggagagaggagagtcaagctggggtgtccagtctctcaactccatttgctgggtcactgtgggttagctgcatgtcactttggaaggccacagctccgggttgggggctggagggagagctcttcatagtgtctctctctgggttttgacaccagcttctttccttctttccgagggggtggtaacggctctccctgctacaagtaccaggatgctgcactctcctgtattgcttttccaagccttgcccatgcctttgttaacagtctttgattaatttctccttttagtattcaatttgagggtgctgttgatttctctgcttgggtcctgactggtggatctcccatgggctctcacttaacttctgatagacagcaggagtcccctctgtggtaccacaaagggaaggacggacattgggtttgagcaagtgcatagggatggagacctcactccctgcaggggcagcccatggttttggaagttcacccttattttggttgaaaactgcctgcttatagattttgtcccctagtcctagctccgccccttctactccacacctctttaaggatctccccagagatagagtgcctgtttcccagacaagtgagtcggactttctgagagaggcagaaatgcagacctcttgtacctggagcatcagaaccagagagagcctagacaaattgattaaatacttggggctgtgggatcaggcaagttgaagtctagttcagttctgtgaactatagcaagttatttaatctcttggagcctaatttttctcatttttaaaatgggtatgaacataaaaatggattgttcttcatagagctgttgtgaggcttaaatgagccattgcatggaaagttcttagcacagagtttagcttaataactcaacaatttgcagtgtcatcatcaccatcatcaccatgaattcagtatttctggctttttacaagatccaaggggatcagttgctgttttatgttcctctttgctcatgctagtccctccatgtagactggcccctcctctcatcttccatttggttaccctctgcccacctttgcactcaccacctcctcgacattttccctccattcggtgccccaatgtctagtacttaccatgttcacacttgatcccaactccctctctgttaagactgagagatctcttggggacagggtcaatgttcatttatgtttataatcacagtgcctggcatgcagtaggaactcaaaaatgcttggtgaagtgaacaaatgtgcacaactcacctctgagacagaggatcccaccctccttgttttacagatgtgccaccgaggtgctgaaaggcaggtggatctgtgtggatctcacagggagtttgtggccaagctgggttcacatgaaacctgctgagccagctcagaacccctgctgcagcccagtgagtgggcagctgtgtagggacttcaggccagaggctgacaagtgcatgggggctgggcaggggcagcaaagtctgcctggaccatcccctgaagggccgtggttggcattcttgtcttgggtggctgatatctttctggtctctgctgctcatttaatcatgtggcttaatccctggggacctgttcattaaggcccatcctttgggcctcactgctacctatgatcagacaaatgggcctggagtgtccctgtgtcacccaggcatggggaggggcttggcccatcagcagctgggccacttatacccggcagtggcatctctggctaccactgtcaagcacctgctgtggcactgctctgcattccctaggagactataaagtgtgtgtgtgcctgtgtgggtgtgcatgcagacgtgtactagtgtacgggtgtgccagagagagaaagcaagaaagagagaaactctctctgaaatacaggaacatttttcttatttcttcttatttccctaaagcatttcctgagatgctgctttggagttcatagaagcagaaaggaacaactgaccctcttaaggacaagacccagagctggagcctcacagcagtccacattttttccctcactccctggagttatgcatcgaatgcctaccatgagcatgtgccaccggccttggacctttgcctggctggcttggagttttaactaaatcatgtctattttctgcatcacacttagcatgtgcatgaagcacatcttcccagaatgaaaaaagtcaggctgcttctggctgctaaatggatacctgcctccaagcgtgtttctgatttatggcatcatttctccagagtcctcggacacctgtggagacccctatccagcacagtgaagccaacagcatggtgaagtctctgtcctcctggagctcatgttctgatgggggaggtggacgataacaaacaggtacacgtgtaacatcaggctggcgatggaaagtgctaggagaagtgatgcagaggaagggcagagcaggtgtggctcgcttggttgggagtcaggaaaggcctgttcaaggtgagggtgtttgtgtagtaaccagaatgaagtgagcaatgagccatgggatgatccgggagaaagtgttccaggtggagggaacagcaagtgccaaggctctgggacaggtgcacactggggcgcttcaagaacagcaaggaggccagagtggcagggacaaggccagagtggcagggacaaggtcagaggccagctaaccatttcgttaacacctcacagttacccttagaggtaggtgcccccattttacagacagggaaacaggctcggagaggtcagctggccctagccacacaaagcagatccagaatccaacccttgtctgctgggctctgaggcctgtgctttttgccccctgccatgtggcctcgctcaaatactttgtgcctttctagcatcactgaccacattcttcattggtttgggtcctttggggctttgcaggctgggaccctgagctgctgagctttgcatcccctctgggtcatggcgaaagacaatcttggcacatgtacggtaagcttcggggttttcacagacttgatcctgctggctcctcccagctgtcctgaggcaggtgtcaatatctccatttcattacatttcattttatttttttacatcatgctcatttttcagatgaagaaaccaaagctcacagaaagtaaagaacagacccggggccattgactcacggctgcgtagaattttggagccaggagaccccttgacgatttagctaacttttcacctttcagatgaaaaaatggaagctcacagagaagacagtggccaagggccacatggcacgtggcaggtgggcagtggctgggatccaggtctctagattcctcaccctcccctgccttttgttagtgggctagaagccacattggtgccagatgacaagctgataaagttccaagctggacagggaaggatggggaagaagagtttatttgcagtaggctcagcagcctttgttctttcatcttagaagctcagtgagtgtgggacagcgacagtaacacggaccagagtcgcagccccagccttgagatcctggtggaaagggcatgctgatggtgtttgaagtcaaccagaggtgtcattttagaccctgctcccctgctcacaccagagaaatccagggaaagcccaaggccagggaagagaggcagagaagtgcatcaaggaaaacacgggctctgaaatcacagagacctgcttttgactcttagtcccactactgagacctgcgtttgactcttagtcccactacctaattgccgggtgacctcaggcacgttaaattgcccctctgagctttagtttcctctgttcaaatgaagcaggggctgatctctcaggttacttttagctctaaaattctatgagctgagggccatgtgcaaatgtctttacctcactgcatctcattttaatctcctgcaaaatagatgaaaaaaaatagatgtggctgttcatagctcacatcaagtcagaagaggctgatttctctaaagacagcacaaagaatccacaaattgctgcctatctaaaattgggcagtgtgtatcttgtccttcctctccaacccttccctgacagataggcactgtagggcagcatctctagctaaggagatccgaaatcagcacaaagatgggcaagctcaggcttgattgctcacaggtgatattttgaagctaggcaagcttctggaggaagaaaaaaaatcaacattgtgtccccatgcgggatgggctgcaattatgcctgttctgggtggcagcgtgatgcagcagcgttcttaccaatggctggtgatccaggagatgctaccaagtgtccacaagagtttggcgaaggctgcaaacttcagcccctcctgcaaagccatggagcacactagtattttaaagacgctatgacgtcctgcagcaaaaacatgttatactttgttgatccgagtgttacccaaagcaatcttttttctttttcatttttcatttttaaggaacactagctctgtgtggaaaaaaccaaggaggaccaaatcggaagatgtggattcaaatcctattctactacttcttagccatgaggctgtgggaaagtcactcaatgtctctgcttacagtatatatatatatgtatatacacacacacaaaatatatatatacacaaaatatatatataaacaaaaatatataaacaaaaaatatatatataaaaacaaaatatatatatatttagatgcagtctcactctgttgcccaggctggagtgcaatggcgtgatcttggctcactgcaacctctgcctctcaggttcaagcgactctcctgcatcaactgcccgagtagctgggattacaggcatgcaccaccatgcccggctaggtttttttttgttgttgttgttatttttgttatttttagtggagacggggtttctccatgttggccaggctggtctcgaactcctgacctcaggcgatccacctgcctcagcctcccaaagtgctgggattatagtcatgagccaccgcacccagccgcttaccgcattttaaaatgagttaatctgttaaatgactagaactgccctgtctacatcataggagtgtatgaggatcagtggctggaatgtgggaaagcaccttatacactgtggggtgatgcgtccatgttggggaaggagatagttaatgttaggtcttggttatgcaactgagaaatgtggctacactttcattcctgctaaacagcatatttgcaaaatatgtatttgtgaaagcaccgtgtgtggagttgggggtagtctcattaccaaaagatttatctcaagcattctttaaataatgagttttcctagtgcattcagtctcagagattataaattacttgataagaaggctgatgattctgggtgggtaactggtgttcagattatcacccttgaaatgccatcagaaagtgtctaaaattatagggaaagttggtggatgattaagattccatttgtaaaaattctgtttacacacaccgatggtggaagttaggtacaaccagactgctgagtggctcatgtatatagattgtgatgtgattatagaattcaaaatcatccaaagcattactggattcatagcaattttttgttatacaatattctctcaatgaattaaaaaagcacaagagctttcatgtgggatactggctgagaaatattttgatgttaagaagacatccccattcttccaaatggtggggaacagtggtctggatcagagcttcttacagttggatgtgcacacgaatctcctggaggatcctgttgcaacacagacttgggggtgggggaaggcagagactctatgcgtctaaccagctcccaggtgatgctgatactgctggtcagaggattacactttagcaggactcccaagagaatatctacatttttgcagaacacataggcccctggtgatctggcctctacctatctttccaaccccaggtctcatccttagatacagatgcccttgcacactctgggctgttcttggcctctggtcctcattcccttccctctgctcaggacctcagctttccaggtcctcagattttcctctaactcccacacgctgcccagcaacctggcaaacaggcctgagactaaaaccaaaggtcaacttctctctaaagccttcctttagatacgcttgtcccctcccttctggaactgactatctccttctagattctcaatctatcttctatcacagcacttggtgacacttaatagttgacacgttccccaaacagactgcaaatgcttggcactccttggacactttatatgaaagttgttgggtgaatacatttccatctaccatctaaaaagagcccttcagatattccctagattataaacttcgaaaacctggactgggcccttcatctgtatcactgaggtgcctggcacacagtaggtatgcagttgagattcactaaattggggacatgaggtctgaggttggggctgtctcatctgcttcctagctgttctcctcagacccttgcaccagctgggagttttaactagaacacacgtattttctgcatcacacttagcatgtgcattacgcacatctttccagaatgaaaaaagtcaggctgcttctcatgctaaatggatacctgcctccagtggtgtttctgatttatggcatcatttctttagagtcctcggacacctgtggagtccctgtgtccagcacagaggcccactctgagagtgagcctaacatcccagctggctgctgtaggttcctgtgccctggacactcggaactcaggccagagcctgctcctctcattctggggagctccttaggacctggcaccatgacaagaggttttcctgggagcagagatgtcggagaaaccatagcaaccatcatcacccacgcttgttctgccccatttgtaaagggggataagaaacgtgctacccgtgatagctgctcaggccttccagctatgctaaaaatttatgatgattttaaatttaattattatttttatcaaagcaatatatgtacataatttaaaaatcaagtggtattgcaaggcttctaatgaaaaccagcagtttcctgctccacctcttcctacccccgagtcctacttctcagaagcaacaactttcaactgttttagctgtttcttctggtatttactttcatatttccatgaatgtcaactgcttgagatttatttcttggttttaaaaaattttagatcctgtctacccaatttctaccatgtaggaatcatctacaatcatattatattatctgcacaattcctacctaatcacagaagatgaggatgtaggcttcttagatgatgtgttccacgatgctgcctttcctttcaccctccaaatatagtgatatgatattttggttaaatcagtatccagcttttacataaccatgactctgtaaatattgtgcacagcccagccttgcagtatataatgtttttgatctctctcttgcgaaataaatattttgtttttcctgtttttttttccattttgttttgttttaccttgctttttccttgttggtttgtatggcttgctagtacccatcactagaaatcccagactctatggcagagctgtaaaatgcctctcaggacagccagacagacccacaagggccatcccttgtggatccaacatcttcctgctccagtttggatggaatgctctccaggcctcctgtgcaactgttgtcctggttcttctcttcatcctcatcaggaaattctcttaggccagatccttgtctctggaatcttatgcaatccttgatttaccttctcattctccaataacttcctgaaaaagtctacattttttgggaaaccaaattctactctcacacttcatttgtagtttgctggatatagaattctattcagaaaagaaagcgtccccctccagaaactggaaaacattttgccattgtcactttgctttggctgcttctgttgagaagtcctaggtcgttctcattccggatcccaggtatgtgactatttttctctccagaaactttaaagatttttttctttatttctgttagcctgaatttcaccaggatgtgtcttggtctggttttttgtttttgacgctattgcagacaggagttggtgagctttttccatctggacaatcatgtagttcagttgaggatttttgttatattagtcctttgacagtgtcctcttctccatcctcttggttttattactctaaaactcctagtaataggatgttctagaatagcttcctggatggaccctctgattttcttatttttctctcactttctacctgtttgtctttttgtttaaccttttcgggagatgttctcagttccaatccttctatggattaaaaaaagtttgcaatcacattttaaatttatttgtttgtttgtttgtttatttatttatttatttgagatggagtctcgctctgtcgcccaggctggagtgcaatggcatgatctcggctcactgcaagctccgccttccaggttcacgccattctcctgcctcagcctcccgagtagctggggctacaggcgcccaccaccacgcccggctaattttttgtattttcagtagagacagggtttcaccatgttcgccaggatggtcttgatctcctgacctcgtgatccgcccgccttggcctcccaaagtgctggtattacaggcctgagccacagcacccggccacatattttaagtttaatttattcttctctgaaatttcctttttaatagcatcctatgcttgtggttatggaggcagtatcatctcttatctctcttgagaattttaattaacgtgttttgatgttttctcctgcttccttcatttattttttatttatcaaaaggcgtatatggtgtctaatattatccaggcacttttctaagcacttcataaatattaacgcacttcaatcctcccaacaaccctataaatgtagataatattattattttcattttagaggtaacacaggtcacacagatggtgttacagctgggatttgaacccaagcagcctggctctatatcttgtgctgttagccaatgtgtctatttcctcaatgtttctttttggtttgatttgtgttcattgccttttagtgggtcccctcaaatgcttggctctttggtggctcattcaggggtaaaaggtccttaaaggcttccttgtgttgagggggcactcctcaagggacttcattctagggtgacctaactaggccttttaaggcttcctgactgtcattatctgtggatcttttatcttgagcttgtagtctccaggaagggatcccctcaaacttctgctcaggtgtgggtggggtaaattagtctggctgagggtcccactactcaggaagtagaatttccctcacctccctgtttttctgcatagcacctcacccatgccctcagctgtgcctgatctctccaagtcccgagtttgtaagagggatatttgtatggctgcttctggccatgggaggatgtgtggggggcctaatagttccttttgtagacttttaactcttcctcctggttttacctccacctctcaaacctgtcttcagcagtatcttatgcctctaattcccgatcctgtctgggggttctcaaatgatgtctattggcctttgctggcttcctcagtgcaggccctcagttctcagcctcgtgtaatctgccaagtcgattgccactcgtccatctactttacatcttccaaaaattggctggcatctatttacggttgtcttttctcccatcctctttgtcctttgggtttatacttacatatataaaaaaaacccttcgattgccatttaggtggggtctaggaagggggcctcccataaacacatatgttcaacctaccatgtttaatcagaagcctagaatgtcagcttccctgcagttctggtgtgctgcagaaaggtcatgagcttctttcaccaccccaggaaaagggagagggatgcttcaagttggtctctgggatggacacagccatggaaccaaccagcacttttaatcccaatgacatctgcctcccatccagtggttttcaaacagggcatcctcagtggtgcctcagggttggtcacagggaccaagggagaaagcaaacgggggtttccatctccagtgggatcagagccatgttgcttttgtctgttttctacgtgggactgcgctaaagctttcattcagtataatgattctgctcctgaagaagaaaagaggaaaaaatagacaaggaggatggcagcagacctatcattatatgccattctctcttcagagatgctgcctaaacctctttccctgtgctattttcatggcagggcttttatgaccacattgtgaacattaaaggaatttagtggagggagcatcccttttgggtgtggatgtgggttttaagcttggttcaactgcttaactaggtatgtacccttgggaagcttacaacctctctgggctctgtgtcctcatcctacaatgaggattctaataccttgttagcaagtgattgggaaggttcatggcacagagtagctactcactaatgcaggcttctccctcaccctggccctggcagtgtacacaatttcagcattgtgtttcctctcaacaaatatgtagtgtcctgatatacatctgtgagccagacagtccaaggtctctgacttcctgggacttgtgtttagtggaaggggcagacaataaaaaacaataaggaaatgaaggtgatatagtttggctttgtccccacccaaatctcatattgaactgtagctcccataatccccacgtgtcaaggaagagacccagtgggaggcaactgaatcatgggggtaggttttactgtgctgttgttgtgatagtgaataagtctcatgagatctgacggtttcatgaaggggagttcccctgcacacactctcttgcctgctgccatgtaagatgtgcctttgctcctccttcaccttctgccatgattgtgaggcctctccagctatgtggaactgtgagtccattaaccttctttttatttatgaattacccagtcttggttatttcttcatagcagtatgaaaatggactaatacagtaaataggtaccagtaaagtgggatattgctatgaagatacttgaaaatgtggaaaacactttggaactgggtaacaggcagcagttggacaagtttggagggctcagaagaagacacgaaaatgtgggaaagtatggaactttctagagacttgaagggctcagaagacaggaagatgggggaagtttggaaattcctagagactcatcaaatggctttgaccaaaatgctgacagtgacatggacaatgaagtccaggctgaggtggtctcagatggagatgaggaacttgttgaaagctggagcaaaggtcactcttgctaggctttagcaaagagactggtggtattttgtccccaccctagagatctgtggaactttgaacttgagagagacgatttagagtatctggtggaagaaatttctaagcagcaaagcattcaaagatgagggatgaagagtaggggtgagggtggcaattttaaacagggtagtcaggggagacctcattgagaaggtaatatctgagtgaagagttgatgcagggaggcagtgagtcatgtggatatgtgagcaaggagaattctcatagcggttaatagcaaatgcagatgccccaaagtgagggtgttcctggaatattcaagaagcagcagggaagcctgtgtgactagagccaggttaacaaggtgaggggagggcaataggagctgaggaagctggagggatactggggtccaaatctttaccccgagaacagcatagctttaaaaaatcattcctttgctcaaaagcatacttgacatattatcatgttaacactaattaacactaggatttggggaaatcagggcagattgtatttgataaaaaagtgtttttcattggagtgcatgaaggatagaaggagatgtgaaagggaggtgcctatttgtggtctttctgacactcgaacccttttagaatttgttagaaaactccctgtacacggattccggtttcctcagacgtaacccaccctcaattctcaccctcacccccactcactcagtgtggccatccacagggctgtctgtctagcagttctcttgggagtgccttctgcaaccaccatcggcccaacttctttaggactattacagggtctcaggtgaactaattcccctgcccactgctgattggtccaggggcgggcacctgactggagctgagccaatgattcccttccctgtattttttttttcccctaaacaggacgtctgtgagagtcaaaacagtcttttgctgggggcaggatctgtaaaatataaaacttaggctctgttaggagccatgtgtgaaaaaatatgtgtgtgggaaaaataagcctgtttctagtgacagaatgaaaagaattcagagggaggaggagtgagagatctgaggatttaggagccttgggttccactcattcctgaggctgtatccctgcccctcctgctggctggttgtcgaagcttgccttggattctgagaacaatataatttcttttatgcctaagcttgtttgattcaggtttctcatgtgcaacctagataacccaccgcctattccttttatctttgaagttacttagaggtatctacacagaatttcatttttaacaacctccctttctgccttcaatttaatttccgttggaaaaccctggccatgaaatctgcacttctacagtctaggacagctttttcaaaactatattctgtgagcttttccatgaaaacgaaggtttctgtggtcaaaggcatttgggaaataaatgctgccttggctattcctatcttggagattcatgatgtattatattaaagaattcctgcaatgaataaatgtgtttaatattttttaaccagaattccctaaattctttttgggccctgcatcctttttgttcataaacatgttatatcccaaactcctgatgttccatagggctcgttttggggcatactctctaggaccacatgcaactgaacctcttcctttaaaatggcatattatcacggtgccccacatgaagatgtgtgaccaaggggagcaccttggtgtggggcattgtctgcctggaggaagggacatttttgataattttcatagagtcattgtctactcactaaccatgagcccatagggctgggtctacccaaagagggtgtcttttgttaacttactccttggtgtcctctgtgttgatggtggtcaacaccatcaccacctccccaaaaggtccttcctgttagttagaattatccccagaagagtggttccctccctgcttcctgacattcctgagaagtggagccatccacaaggcaaggcaaaagtgttccagaggctctgctttgagcagaatgggagttccagatgttgaggtgctgcagagctctgtcttaggtgtgggatatttggaataatctctgcttctggagtgttttttttgaccatcttcccacctgctggtgggcatgatcaccctctcattgcttacagtttgcagagaactctcgtttgagcccttcagccctcctgtaaagccagtgggttttatttgtctctattttacaaacgaggaaacagaggctcactcacttggcctgagtcacgcagttaggaaaggaagagctgggatggggtcttgggtctgcttgacctggtcatgccattttctctgtcttcctacactgcctccatcattaaactgcctgggcacacatcaaactgccacgggcacatttcaattcctttcctctccatcaccacccaaatatctcctggactcctgggcctggcctccttcctctggggattgagaggtgggaatgttaaggaagggagatggcatctgtggggccgcatggtttggcagggcaggaaggctgcctcctgatgactgtggcagggataggcctggctgtgtccatcatcctcgggatcaatgaccaagcagccacgtgtgtctgcgcctcctcaggtggctttacagacaagcatctctcacctgcgagagcccacctcccatccttcaacagatgtgttggcttctctctcacccgcatgggactcacctcccactggcctaggaaataagcagctttgaggtgaccagcatctgcaagaggcagcacattgctcagggccttctcagcctgaagaaaggtacgatggagggagccctaatgcaggaattcaagggtctggctgaggggtctgggggaagtgacaaaacctcagcctccttttctggaaaatggggacaaggagttctgcctgacactcaaggtcatggtgaggggattgccaggaatatggaatagtatgacccgaggaatatgggaggtggctgcaaaagccaaaatccatgaagtcaaccagagttgtcagaagctgttttcaaatatactaactgctctccaatatggtagccactagccccctgcagctagctaatttaaatgaataaaaatgaaactgtattaaaaattcaattcctctgcaaagacataaggatgatacaatggactttggggatttggggaaaagggtgggtgtgggtgaggcataaaagactacacattgggtacagtgtacactgcttgggtgatgggtgcaataaaatctcagaaatcaccactaaagaacttattcatgtaagcaaacaccacctgttcccccaaaatctattgaaattataaaaaagttcaattcctcattctcctagccaccttgcaaacacttgattgccacaaggggttagtgactaatgtattggacagagcagacagacaacattttcatcagcccagaagggtctataggacagcactgatcagatttttctctaacctgtttcttctgccccatccatcccctgcccctgctttaaacccgttcttcatacagcctgcttccccaactccccagtctcaaaggaaatcgtctaagtgagtgtgctggtccatctcccagggatgactcaaactctcagcagcaacgagactggagttctcttgcagaaactgtgtgcacatctggcaccccgagtgagataataagatcctgaaagatggggtcttttctcatgcctcctgcacccctgatgatgacctgcgcagtgttagcatgtgacaagtccttaatcaagattatgaattttctctgaattggtatagctcatcatccagtcaggttgactgagggtccaaaaacttgggtcagaacagtcttggttcagctatgaactcactgcatgacttcaaagacatcattacttcaagccaggcctcaggggaaagagaaggttggcctggaagagatgacctcagaggttctttcctgctctgaccatctgtggctttgaggcagaacacagactttttgggtagccttgtagactgcagccagtgctcagaccaaggccatatcccacagggaactgtgctgtgtgaggatgtctgtgatgggggtctggtactgagagtgcatgtgtgtgtctgtgtgtgtgtgtgtgtgtgtgtacatgtgcttttgctcctgaatcaagataacaggctaggaaagctaccattgtcatggagggacataactaacttctgtttaggctttgagtgtggggtctccatgactcattttatttccttatttctctcttctaccacacagattagattaatcatataagttctggtgtctgcaagaagggcctctctttggggaccaagactccaccccctggactccgggttgtctacaggcccccacggtcccagggcctggttggcctcaggatgccctgtccaccagccctcagggatgccagagatcagaacggacacaaaccttcgtccctctgcatctggaagggcattgagttgagaaaagtacacaggatcaacaaagtgtctcctcagagagtggctgatggggctcggggtgccctggcgcctgaggtgagcttccagatggcactggcgcagtgacatgtgtgtggccattttatctttcagttggaggagcagaggactggctgtgatgggaggtaaatggccacactcccgtccctgcaacggggtgttcgtgagagaggggtggtgggagagatcctggagtttgcagtcagtcctcctggggtggaagccctcgctgtctcagcagcctggtaagcctgggtatggtgagtgccagactctagagtccaaagtcaatggactcaaggcacaggggtggcaacaggtaggggctgggctactggggctccaccctttcctcagccccaacctgagggcccagggcctccctcctgctggaatcttccctcccctcccactcccctgcaggctgctccccacgctcctctcttgacccacctctgcagtccttcctgttatgccctgaacgcagcattaatcttactttgggtcccccttaaatccatggttcccagtcttgggcacctctttaccttctcttcctggtgaaattctagaggctaccatcactccttggcttgtggctgtatcactccagtctttgcctccgtcatcacactgccttctcttctgtctgaccttcctgagcccctcttatgaagacttctgtgattacatcaggcccatctggatgatccaagaccatctcaagaccctgctcaaatacccttggtgctttccctgaccctgttccctgtgattgtgtctcttcctctgggccgtgatcaaggacttgatctttttcaccataatgtccttacttgggtgcaaagcctgagatagtatacatggtttacgaatagtttgctgaagaaataaatgaataaatgaatgcatgaaataagctttagggtctatacacatgggtctcccaggggcttacataggcacaggcaaggtgccaggtccctgaacccacatcctttggtattccaacacttcccagcccctccagcttcccccagtgggcggcagcctgctttcctttcagatcttctaattgggtcgggatattcaggatgactgagagagaaagaggctgatccatccttcccgcctctcctgaaatcaagccactcacctgaccaaccacacctgttacttcaaaccttcccccatgccttccttccccctacctaccttacctctccagtattcccatcctctgtccctctctcacatagtaaaaggtgaggaaacccagggcatcccagcccaagccagggacatctttatgatctagcagcatgtcacaaaccccttgctggagagcagtccctcacagggtgggccaagacagctcaccagcctttcagagtcaggcctgcaaccctccaccatcacccaatgcccggtccctgtgcccagctcacctgtctctccccagatgggcaggtactcatcctgctgaatgtccagcatgatctccagcccgttgcctgtcccccccttgaccgtggtgagcagaggtttgccatcctcgcctgagttaaacatgtaacacttcccatattttgtaaacacctgaaggagagaagagagagagagagagaagcacatgggtaacttcagacgggggtccagagattggcgagaccccagaaatctgacagcaggtcagagtccccacagcccatcaccatcaccgctctcaggaaccagtggtttttcatcctggctgtgggcctgacttgtaccaagtgaaattttggcatcaaagagcaaatctggatgccctttggggtttgttgcagtaggatctggtctcttcttcctctgagcactacctctgggaggtcctgttcacttccaggcattaaatgtcatctgtaaactcctgacccttcagtccacacctccagccctgggctctcttctggcctccagacacactagtttcactcattgtcttataagcatacctttgagatgtgcttcaagcagaccctgggcactcagcttgtccagagggaactgatcttccttagcttccccaccccattggacaattctcttgcacttctgtcccagggaacagcatcgccatctgccaaggggttcaagtcaggccctcagagttgctgcccactcctgacccagaggaccaatcaggcagcagagcctatcaataacctctctacatctgtcctgaatttagccttttgtcttccttactgctgaaatttaggacccaagcgttttttgactgcatcactctggtttcctagctggacttcaggattccagatgaccttctccagcccatcctctaaggtaactgtgagtcattctggaatgcaaaccctatcacattaatcctgtgctgaaaacccattagagatccctacgctctttaggctagaattcagacctgccacacccagtcttttgcaatgccctccacctattcctcctgcctttcactgtgctgcttcccgcctgagtccagcagcatccactggaaggtagactccaggggctcagtgactacgtctgcttactcatgcttagtacattgctggcacacaatagggctcagtcaacttttgcttgatgaaagtatgattacaaagaggccccgtgatggtgtagaaaaagcccagggaaaggaatgcagagatctttgtccaagttttgacattgccacttcttagtagtgtgactttaagtgaaccaaataaaacctcgcagcctcaatgtctccatctataaaatgggggttctggtctttggctttgctacctctcaaggttattgagaggatcaaatgaggtaatgcatgcaaaagtgctttaaaactgcaaaagctttctacaaatgctacgggttatgatgattatataactgctttcaaacctcgagctgaagccaaattacatctggcaaaattggctggaagagagccaggctgactgtattggattcctgcagccacagagatttgggtctgggccactttcctgagcatgctccactgcactgtcccatcctacagcatggaggccacagggaggctctttggcttcccagctttcagtgcacaggcaagtaaataacagaggtgactgttgcaggctgcctttcttatgtaaatctttacggctagttagaagaaaggaagaggggcttctaccctgtgccaggaactgtgctagatgcttatctgttatctcatttaactcttacaactgtgaccgttggcagttattgctttacctattgtgcggaggaggaaaccaaggcccagagaggttaagtgacttgcctaaggtcacacagctagtagcagaaaaactgagattcaaatctacatctgtctgattctaacacatgtgccctttctgctgtgctgtcctgggagggacatgagggttttcgtcattgggacacttcctagccacatactgctcctttctgccttgcttttctcatcagtccatcaatattcatatgcatatattcctactatgtgcaaggattatggggactgcaaaaaagtacaagctctactgctcgccttgaagacctgtaggaaggggtagtgaaacatctatgtttttcctcactatacgaaacagctctgagtccctggccagctgcactatttcaggacagccaattcctattctttcagcttcatggcagaggagaacagctggaattaatgcaaagtccaaagcaaatatgctttttcaaagaaccaagttttttcataactattgcatatagcaattgaacttggcaaatgaacttatcccatggagacgtgttcttggggatcactgtaatgaacagataagagcatttcataagcacatccattgcaaggcattgaacacacctggagtgaattctggggtgctccaatagagcttttctttgtagacactctaaatatcctctctgtctcttcaaaattgcttaaaatattaatttgcctatctgtatgaagggatttgcaagcaaaagtaaatttcagcttagcatcagattattgcaaattccaactccttcaccttttagtccctgaacttcagaatactgggctggggttagagagtagtgtggactcctgaaatcagctgtgatcttggccctgccaaagcatgcccagtgccattggtgaaggtgttgaccctccctaagcaactgaagatgatgacaaggtgtaagaattgaaaagggtcttagagatcatcttgttaatccaccttactttacatattaggaaacagagtcccaggagagaggaaatgacttgctaaaggttacacagcaagaaagtgtccaactgggaccctttccttcctttataccagcctctctcagtttttccacttacaaaaagaggtggagggtctagcggggtgctaagatccccccatctctgaacttcaattgatcattgactgagtgtctgctttgagcagatacagtgggaatggaagcctcatgaattgaaggctttccctgtcaaagagggagcagagaggtctttatagtgggagtgagtagagacttgttccccatccttgactgcctccttgctagggctggtacccatcctagcccaggtagcagctcctgcagctgcccttggtgtcaatgtaatctttcctgctccttcttctgggggcagtgtgctggggcaagttcacaaacgtgccaggtgtgagctgacatagcttagagcttggtcaagggtggcggtcaccagagtagcaggggtggggagccagagggagactgaagccaaatcagagaggtggccaagtgacaatctatgacagctaaattttttatcaagtcaagaccaccagcagaggcctaaaatccttgtgtgacttcctgttgcatttaggatgaagcccccagtccccactggggccctgtatggttgagcccctgacacactttctccctgctctcacaggcttcaaacatactggcctcttcagtccccaggatgtgcagcaagctcttccccgccaggcatttccgcatgcctagagtgttctctgcctagaatgttctggcgcgctttgcctggccagctcctcctgatcaggcctcagcttgaaagccactttctcagagaggtgcttggcttctccaggctctcagccttcattcatatcgggacttcttgttttacaacctcacatcccttatatttttccattatagtgtctatcaaagtgtgtaactggatggttatttacatgattatttgttggatgtgttttctaccagactgtcaccttcgagagggcaggaactgtgtctgttttattgaatgaatgagtgaatgaatgaatgaatgagagtcaaggtgctgctgccacacatttccttgtgcacctccaggaaatgccctttctgtgttggctggcctcacttcgttctggctggagctcatgctgacatcttgcccagctccccttccctcccattctctgctggagccttctcacttcccacctaattggacctaagcgtttttgcttgcatctccatgaaggcattagaggaaataatccttttaggaactaagatgactggggacagtttaccttcctaggtgctggcggagaggctcacggaaagcgaaacgcccgctccctggctgcatgcctttgctggtctctccgcctgggctgctgagcctcccgctcctgcctggcttttttcagaggattattttcctctctgctaaacatcaaaagccagagagctatttacacacagcgcaattttgctacaaacttggaacaagatgcagctctttctgcattttggggcaccatgacgtgtaagaacacacgcttcaaatttatgccttatcgcccccagccagaaaatataatttatttaagtccagactgtcaggttgagctcactgcttcttcagacctgctattctgccaggcatttctctgctttcctggtaagtgctgacaggcccactgtggatggcagggctgcatttgccgggttgctgagagtctagaattgcacttagttggattggtctgtaagaattaattatgaattaagaaagatgcatgtttcaaacctggatctccaggaatggtggggggtgggggctcctgagataaaaataagtcccacaactatcattttcattcctaatgcttgcacagtgtgttactgtttagagattgagattgcatatacatagaacttcaactttctcaatggccctttgaagatggaggaaaggaaactaacaattccttagcttctactttgtgctgaccccagattggcacagtcatagttttatataatttttttttttttgagacagggccttgctttgtcacccaggctggaatgcagtggcacgatcacaactcactgtaatctcaaactcctgggctcaagcaatcctctcacctcagcctcttgagtagctaggactacaggtgctcaccaccatgtctggctaattttaaacattttctttgtggagatgagggtttcactatgttgcccaggatggtcttgaactcctgggctcaagcaatcatcccaccttggcttcctaaagcagtgggattacaggcatgagccacagtgcctgacctcattcctcattcttcttcctcttcttctttttttttgagacagagtctcactttgtcacccaggctggagttcagtggcatgatctcggctcactacaacctctgcctcctggggtcgagcgattctcttgcctgagcctcctgagtagtagctgggattacgggcatgcaccaccatgcccgcctaatgtttgtatttttagtagagacaaggtttcaccatgttggccaggctggtctcaaactcctgacctcaagggatccatctgcctcagcctcccaaagtgctgggattacaggcatgagccactgcacctggccctcctcattcttgattattgtcccaaccacccggaagtagaggcattttatattcacatccagaaatggagaatctgaggctgcttaaggccacagtgccaaggggtagcagagctgagactcatgggtgagaccttcccatcagagacattgaaaggaagggacagtaggctaaaggcagctcactgacagctagtcaagtctgtggtcattctcaattccagtgttctcttttgcaaactgggcaaggtaatcatgccatgtagtagatttgtttgggaggttacataatggacatctttacttctatactcgaaggaagtactatgtgtctgcttttcggcagaagagagatgagttatttaagttatgaagacggggtcagagattaattgaaaaatgggggtttgggggttcctgtgctctctgcttatgtccacacaataccaagctcatcttaaagtagttagaggggaagaaaacagccacatgcccctgcttgtctattctctgatgatgttaagcctgctgctggaagcccagggtagccaatgggattcctgggggccaaggagttctgtagaaagggagatgcttccatgcacacagcccactttgaaaatctacatatgagttccagcagctgaattgtaactagctattgatacagtggataccaccaatctgaagttgacacattctaaatcagataaacatagaataaagtgtagaataaggagagagtctcattggtcctccagtaactcttcaagtagctctgaaatcacaggctggctttgctgccctccctggagtgccttcagtgctagccactttatatctgctatcgttaacttttgcaacagctctgtgaagataatattatcatccccattttacagataaggaaactgaggcacagaaaggctgagccaggtcacagagctggaggagccagggtgaaatcactcttggcctaattccaaagtctatactctttgaccccatccctcatagccacggctcatatccttacccctctcccagcctactttgttcctggcagactagtgaggctggtgctttgctgacattagagctctcccacctggtagtgggggaggcacatctcagagtcagaggaacccgagcaaagtgccagacaccaaaaatcttcgcctccaaacttcttattttgcacctggggagtctaaggttcagaggggtgaaatgacttgtcccaggtcacgcagctaatctggagggagagtagagatctgacctgggcttcatgtcttgaacctctgcttttcctcgaagccttctgtttgcacatgccagggcttggaaataatggctaggatccttttcctggagcattgcatccaggcataagagtaagattggcagctgctgccaagcctagatgccagcctctgggcttggtgtgatctgctggggtattccgccttacagagtttgggaaatgcaaagtggagcccttactgagaggagttaggagtagctaatacccatgaagacacggttttctggtccaattaatagtgcaaacaacatttctacgctgtgtacctacttaagaaaataaattatgtataagcccccttaaggactgttgaaacatccacttaccagcacacagctggtcctgcaagcatcaaaccttctaacctattcattaatcctgacctttagggcttcttctgggtgatgggtttctcatctcttcttgcttattacacgtgaaggaaatgaaattgcactgctccaaaatgcctctaaaacttagctgttttttctcttccctgagtcaattccgctttcttctcagtgagctactgaaatttctcattagactgttttcaaaataatatgcttgttaaagctagccatttagttttgttttgtttttctctttcaaactcctcaaatacatttcacacaattgggaagtgagaaagtctgtcaaatgggttaccaggcttccagtaaacaaaatgaacctggctcttgttttctgaagttgcaattaaggagcttgtcaattaaatgaagccagagggatttattagcaaggaagctgctgtagatggttagctctttgaaggtaaagactggatcttattaaaaaacctgcttgctcattcacctgttcctgaaacaggaattttttgaccacctatcatgttctaagaagtgctgcatggctgtgctttttctcacaatgagtttaaaaaagtgatttcaataaacactcatgtaagcatctccatgtggcaggtgctgtttctgaaaataaaggagatgaggcgaatgtgaccgcaatgcagcccctttgcccttcccaatcaggaggccacatgtttttcaggacatcattaatgtcattctccttagaggctactttttctggggagaaagggaaggataagcaatcatgtggagcatgagtgggcactgtgctgattgctttgaacgctccgtctgttaaggctcacaaagctcttggaagtagatgttattcttcccagcttacagcgagaagactgaggctctgagaggctgcatacctagcccaaggtcctacagctaaagagtagtttgcctgatttttcccttcttatgtaggggttgctggaataaggtttagcattatttgaatgtatgatatggtaacgtgacccccttctccatgccctggggcccatctgctgtgatgtgacatttcctgtgctgctttcactaactggcagagaccttctagtctcctgcttccaagactgaagcacagccggggccttttctgctgggcagctgtccagagagcttcagaccgtgcaggaagagatgtgtgaatgctatgcaggaaaaagagcatcaagcgcctgcaaatctgtctgttggttgggaaaacaacacgaaggggaacaacaggcaaatcttagtgttctccttcaattgtgtggacaaatgtgttctcctggcagatgacacagaggcagaggggaaggctgaaggcactgcagtcgttcacctggaaaggcattcaagatgctgggcctctgctgctgcatccctcctgacaactcatctgagaatcccaaatttggtctgacttgagatgatgaagtggaaggtggggaaaccagagcctttcatgttggaccacagcttggctggttgggggaagaaggttgacaggcatttctgggtttgatggaaatttcaaatgggacacaatgacaggttgcttgctctttcttctgaggtctctactgtctgtctcctgtagatagtaggggttgtgtcattttcatctctgtgttcccagggcctggcctggtagctggtgtacagaaggcacttaatgggaggtttgggtgaaggaaaaaaagctaatatggaattggggaccaggcagccctggtttcaaatcctggctctgccactgatttgggtatctttttggttcttcatctttttggttcttgaacgtgcatctcagcaatgctggtaagaataccttccagtggagctgttgtaaagatcaaaaggggtataatgggcctgaaagttctctgtagaaaaacaaaaaggctccgcccaggcagggagtattcctgcttatggcttggatcgtgcataagccctgcaggagctagggaggaagagagttgctatttggctgtggatgttgaatctcagatgttgttccatccgggaccatgcctgtggatctcttgttcatttacttagtgagcatctctagaacacctcttgtattccaggaaccacatcaggccttggggatacagacatgagccaccctttaggaatcacccagtggggagggtggcctgcagacaggtactgggtggtgccaggcactgtgggagtgcacagaaggaagctgcctggtgggcagtgatggggggatggtggttttcggggcatggagaagtgttgtgaaatttcccctagggacagtggtggcgacagcagtggtatttagcaggttgagacagatcccctagactggctccttgtcttagcagggccatgctaatgctttcagaaaggccagtggtgccagtccatgcttctggctacctgctgagccctgcctatctgctcatcattccagctgtcttccacactggaacctcacaccctcaggtagacaactatgggctctactaagaggcgggcagaactgtagaagaacactgaccgtggagtcagattatgctggctgcatacctactacatgccaggcactgtgcacaatgaataatggagcttagctttcacagagtggataattattaagacagagatgcagtgactgagaggagttagcatttgattctccccaagagaacctgtcagcctcagagatctccccaaggctggctctctgatctgcccactgccaacacatcaccagaccacacctaggagcatacggccaagacaagtagattaaataagaggaagcacatttgtagtgagccaaggctgactgtgatgagcacccacttggctgccaccagatgtaggaagcagaacccaggaggagttccctgcttttaggagggcaagaacccaggaaagagtgagggagaatgtgtggccacaaaccatccacagtctgctcccattcccatctctgttgtccctactgcctatttccaaccctactggcatgcttcctgcagcccttcctgttccagttcccaggcacagcagactggagtcaggggtgctcacggtacagcagcccagacactctgggatgtggctccgaggctgccacgttcggtggagcacatcttagtctacgttcgatcacccatgacatgatggatttgaagtgcctagcagagggtactcacttgataaaactagctaataatattattattaatagggattctgcacctgaactctgatatctgagctcctataggatgtgatttctgggctcatggttcctgttagaagtttctttttaatatttgatgttttttggttttgttttttaattgacgcatttatgaggtataacatgatgtttcaatacatgtatacattgtgcaatgatcaaatcaggctaattaacatttctactacctcacatacttatcatgtctttgtagtttaaatattctaaatggagaacatttgaaatcccctcttttagcaagtttgaaatatacactcttattaactatagtcaccatgctgtgcaacagaataccaggactcgttcctcctgtctaactgaaactttgcaccctttgatcaacatctccccattccctgtccatccccctgcactgccccagcctctggtaaccagcagtacaaatgaccaacagatatataaaaaatgcccaacatcacaaatcatcggagacatgcaaattaaagccacaaggagatatcacctctcatctgttacagtggccactaccgaaaagatgaaagataacaagtattggtgaagacgtagagaaaagggaacatgtgtacactgttggtgggaatgtaaattagtacactcatttcagaaaacagtatggcatgtcctcaaaaaaccaaaaatagaattaccatatgatccagtaatcccacttttgggtttatagctaaaggaattaaaatcaatatgctgaagagatgtctgcactcccactttccttgaagcactatttacaatagccaagattctgaaacaaccagagcacccatcaatgggtacatgaactttaaaaggtggtatagatacgcaatgaaatactattcagcctttaaaaagaaggcagttctgtcatttgcaacaacatagataaatctagataaataagacattatgctaagtgaaatacgccaggcacagaaagagaaataccacatgatctcacttatatatgtggaatctaaaaaaattgaactcagagatagtagaatggtggttgccattaaaagctttttttttaaacagttgcttgcctaatcttgtgattacaaccctattcttgcttctaactgctgcatgctgaatttacgggaatacctgcctgcttggttttcctgtggctgtgcccagatcccttctggaacgtttcttgggcattcttgcaaaactctgcattactctgactggctatttctgctcaggtgaacttcgctttccccgcgccttcccagctcctatcccatgggcttgggtgggctaattcctactgctgtgagtgtgctttatgcctggatgaacaaccctgagatcagacacatgtcactccttgcacctgcctcattacacacctgctgggaatatcccttctttcgtgcaggtgtggaatgggagaaggaagaagaggggatcagaagtgtgttgtgttgtgttcctggttaattttgcgttattctacagggctgcattgaaagcgatgcaccagtggaaaccaaatgatagtttatgatgtttacagaagaaaagcacatgtttccattaatggcagggcagaaaacaatcccaaggcaggctgattctaaaagctgatcaagaaaaggtcaaataggtaacgacccatatggcactaaaatcctcataccacattcttactgagttcatgttttcttattaaagtcatatttcagcttttccaggaactgctcggagaatgtcattgtctgctagttttccccacagctggtcttggagattgagtatcatggaattttagtagcaaagcttacattatgagtgttcaaagccatcacagattcacaaatgcagagagttttctatagtttaatcagattgctttcctgacatgtgaaattagggcctggctgggagatacacagcatgcatgatgccactctcctttctagatctgtaacagacataattgattgatcacaatgctctttccctctgggactcacaattgttttcagcccaataattttggctgccactatgggtcctttggagttggcaagttagataaacactatttgccatttttgcaccagaagcatatgagtgctactggtggtgccagtgtctctgtagtaaaaagcaatgcctgaaagtggggaagggtttgagcaggtgccacagggcagtggtccccaacctttttggcaccagggactggtttcatgggagacaatttttacatggactggggagaagggggcgatggtttcgggatgattcaagcacatgacatttgttgtgcactttatttctattattattacattttaaaatataaagaaataattaggtaactcaccataatgtagaatcagtgggagccctgagtttgttttcctgcaactagacagtcctatctgggggtgatgggagacagtgacagatcatcaggtattagattctcttaaggggggcacaacctagatccctcacatgcacagttcacaatagggttcacgctcctgtgagaatctaatgctgctactgatctgagaggaggctgagtcaggcagtaatgcaagcaatggggagtggctgtaaacacagatgaagcttggctggcttgcccgccgctgacctcctgctctgtggcccagttcccaacaagctgggttggtaacagtctgtggcctgggggttggggacccttgccacagggcaatatgagggtcacaacttgagggcttgggtagaagggactcatgagtgacagaggcagaggtggtatcttgcatatttgacaaatatttcttagacttggcccctgtaccatagaagagagagcataggctttggaatcaaagcatgagtttgccacttactagctttttaagttgggctaatatttattcagtatcctcatgccttactgtctcatcctgggagactagaatcccaggggagtgtggttttcattgtgccacagttccttgaattatgaactaaatatcaaaggacctaagatgattagaggctttcacaatgaaagacaaaacatttttagttcattcaacatctaatgagcaactattacatgtcaaacaccgtgctaggtcctgggaatacaaagataaataagacatggacaccaacctcaggtagttcatgagctataagaaatgaagataaaatagcttaagatcatcagggagataaagcagctgtaatatcatcatggattcatgcacattaacttacagaatgcaactcttcagcgtaattgcataaagcaaggtccacctgttccagcctattgttcttgtcgagctgtgggcattcaagggcctgttttctgctactgctttcacatcagttcaccctacagccttatctttcctgtcctcttcacacccctacctcccctctagatccctggaacaggaccaggactaggatggggcaaatgaagacctagggcatgaaatttaaggaagcaattatttcgggggttgcacttgcattaacctgagtgtgggtgcctccttaaattttgcgtcttagtccagctcctgctcaggacaaagtcagatgaaaacaggaggagagacagatgtgatgaaagggagtgacaacttgttctcacaacaaacttgcaaaatagacactattgtcccatttacagatgaggaaattggggttcagggaaggtgagttacttgcagaggcatcacggactcgtgaagtgcaagcaggaagagagaaagagcacaggcttttttactgagatggatccaagtgtgaagcccagttctatggggcctgagtcatgtgaccttgggtcagttacttgttttctctgacctgtttcctcatctgaagaatgtggataataatccttctcagggttacatggaaacgaagtccagtctcctccactttggtctctgtgactctactttttcatgtgtcgaatggcctggccacacctgcctcacagagttgccagggagaccatgagttctgaggggttgtctgaaggatcaaatgtcagttctagccaggcatggctcacgcctataatcccagcactttgggaggctgaggtggggagatcacttagggtcaggagttcaagaccagcctggacaagatggcgagatcccatctccactaaaaatacaaaaaattagctggatgtggtggtgtgcaccagtagtcccagctacttaggaggctgaggcaggagaatcgcttgaaccggggagatggaggttgccgtgagccaagattgcaccactgcactccagcctggtgacagagcaagactgctgcaaatcttttccagaaggataattgagacttatgccacatgtcaggcgaacctcccagcaaccctaccattactcttttttttttttttttttttttgagacggagtctcgctctgtcgcccaggcgggactgcggactgcagtggcgcaatctcggctcactgcaagctctgcttcccgggttcacgccattctcctgcctcagcctcccgagtagctgggactacaggcgcccgccaccgcgcccggctaattttttttgtatttttagtagagacggggtttcaccttgttagccaggatggtctcgatctcctgacctcatgatccacccgcctcggcctcccaaagtgctgggattacaggcgtgagccaccgctcccggccgcaaccctaccattactcttgttgctagagaagcggtggcagaatccatgagaggctaaacaactctctcaacgtcatgcagcaagtcaggggcagacgtgggatctcgaccctggtctgtctgattaagaagccctgggaactctgcctcccaggatgcagaatgggggacagcaagaaaaaatatttctcagcaatggaacaatacctaagatttgcacttgagcatgttccattgtgcctgaatataaattagacaaagtgcaaaccagcatgtgaaacctcttgagtaccaattccgtcctagacatggcagagggacgccttgagactcttcagggtggtctggtggtgctgccaattaatgatatgagtctttgctctacccccaaattcaactgaagtttcacaactctttttctcaaagccagagaattgagggagacagcgttgtggctttctacaggtttaagtcttggttctgttttgaaaatgtcgctctagttagtttcctcctctcagtcctgcctaccttcagcctgcaaccgagtgagctgctcatctcttacctggttaactgccacagcctcctacagagtctcccaccccactcccttcctcctccattcattttccacatggcagtcagggagatgtttttcaaaagcaaacgcccctgcttaaacctctgcaaggctgcaaacttcttggttttgggctggcatattgttgagaaatcacaagacctgggccccacccaattccttctagcctcttctctcctgcactacatgagtcagctctgcccagccctgcctttctccaaagacaccatcctacttcataactctgtgctttcagacatgctgacatctatgctcagaacatgtccctgccttcattgagttaactcttactcatacttcatactccagctagggaatacttcctccagaaagccttccctgacaacctacccactgctcggaatggctgacatgccctcctggggctttgccagcaccctgtgctcccctccatcctgtcacactggacagtctgctcactcctacttgaacttcaaatctcagctggctcttccaaaccaaggtcaagtctgatgaagggagcccttttcttggtaccacatacttttccttcaagccccaattgctgcatatttgtgtgttcagctgattgatgcttgtctctccacactagactataagctctaggctatcttgcttttgctcacttcctgggctcactgggaagcagaatggggatggagacttgcatgcaagaggtttactgggcagtgtccttgggctccacacccaccgatcacacccatgcaggagggaagttggcaggagaagttgaatttccatgtagttgtaacagaggcctcagctgacctgtggggagttttggagtgggggtggcccttcagagctgtcctggattgaggcaaggtgccagaatttgtatccccattggatttggggtacccctggggaaaggacggaactgtgggtgaggtgcctctctaatttagagggcaattcccaggcttggaatttccagagtgaagcaatgtcagctaccaacactcacagtcggtgaatgcatgagtgccttagtttttcaaaggtggccatagtagtcaccatacttccataattccagtatctgcccttattccagggacacagtgagtgtgcaacaaatgctgaatcagtgaatacgtccatatatttttctctctttgctccatccctaaagagtgggactgtttcttatttatccaagtactctagacacagcttagcttagcataggcactcagtagaaatttgttgaatgattgaattaaaaaagaatgcatgaaagagataatgctgcaatttggtttataaagaaagataaatctggacacagctcagctgttcagaggctatgtaaagtgagtacacctgtgtggccctgccctatagagccagcatcccagaaagtagaaaatttggcaggtgggcaacacctctcacggcaaaccccttcctgtcctcaaggcccaagtgggatgtagctgggaagaggtttggtaaagaggaaatcaggtctccttctattaatgttgacagtcaattctctgtcttctgaaaacaaaaaaagaaatggctgcaggaactaggggtatttagaatagaaaatagccgatttagagagaatcacgcctgctatctgcaaatatttgaaggaatatcatttggaaaaaagaacagacatattctttcttgtactgccatggagaatagttctaggatttgggttggacatagagaaataaaataacaactaaagtgtccaacaataacctttcttgggagatgcacatattctgtcataataatggtgtgggttacaaaggtgtatccctttgtgtagggtaaacatacctgggaacaataacttaggcatgccctgaggatgaccctgtatggcagatgcatctgaatgtgtgttctgagctagagaattcaggaatggccaacctggagactcattccttgtctatgaggaacacctgagcccctgtcctgtcctgtgggacatgggccatacaggggattggggacctgagctttgggttagatggaggttgttaggtggaggtcattagtgggagggtgttaagtgaaaatgctatgtaaactgcatgctgtttgcaaatggtcgtggttttcctgcccagcccgccactgggcggctgaacagcggcggccactgggctgttcataaggcagatcagttgcccagcctcccaccactgggctgtttctgtatgtaaggcagttttcctgtatagcccgtcacacactgaactctctccgtatgtaagcccctagtaaaaccccgtgtctcatctgtgggctctgggtgtcttctttagcctcttgaacctggtgccttctctactgaggttaataggggttcagcacaaaaatttcccaaaacaatacaggtaaggtttgtgcaggtcaatgtacatgaatttttgcaacaacaaaaaagcgacgttaaattctcctctttttctcctccttcttttcctgctccccttcctccccctcctcatcttcaggtaaaggatagaagtgggcataggtacagaggaaacaagaatggcaaaatgttaatattgtaggacttgggtgataggtacaaggggttcattaaactattcgatctagcttgtatatgtttaaatatttttcataccaaaacacatacacgctaattattaaatgaagatgaagcaaccacaaacaattttgattgtcagttgaatgggctacattggaaggtagtgagctccctgtcactagaagtatttatgcaaatgctatctgcatgctcctcaactccccaaccccccaagagtctgggatattggaggatattgtcaagagcaggggactaagcggataaccttggcctggatcctcactttttcctcctggagggggggacttggctggagtctagaagagacctggattctccagagccatgaactggagcccgagctcctcattccagatcacaggaggtgctgaaggtggagtcagggcagacatctaagggccctaagcctgcggagaggggagtggagcgagatgggaatccaagtcagaatgaggaatcacagatttggaacacagtctgagccagtgacaacatgagatttggggttcagatccacatgccactgcttatcagctgtgtgtgtgaacctgagcaagggactcaaactctatgagcctcagtgttttcatctgtaaagtggaagataggattaccttacagggttgttggagaattaaatgaatgtgggcacctggcatagagcctactatgcttattgtggttattattatttacaaaggggagacgagcccatgcaaagacaggatccaatgggcagaacgggataggacttgaagacctgcttcaaacgccagctaccactggaggctcatatttctgggatggctaagggatgagtgtctgcatggcttaagcaggaggaaaaaaatctacatagacccttctattgataaaattttaggtttctagaggaatcccaagcaatttttaggagtaattgctggggctctccatgccctggatccctcccctctctcataaaactgcatgatgctggaaagctgtgtgttcatattgctaggacagtctgccacagctacccccacgacccccagaatcactcagctacagccttggaggccttggcttgtgaccctatcctagcccctgagccagtccacacagtgaatcccacaaggacaggcaaggcatctttttcatccctctctctgcagctcctgtcacaccaagggtgtctaacagctgcgtgcagggtaaacagacagatgcatgagctatgtgtgaggacaggtgcttcatgctcctgggagtcctgtgaggctggaggaggtcattctctctggggcggcctgtcctctccaagaggaccatgagtggccattgttggcaggcagaggcctcttcatttccctggccggctcaggctaccagtgtggctgccccgctgaacacgccatacatcacacgcctaatggtgcgttttagaacataagtggtaaccaccaaatgggacccgagaagggaattagagccagacacacagtggggaggggaaaaaaaatcaagagtagcctcagaggaaatggggccagatacaatcatcctgagacaggagaaaaccatctcccaagcatcaagaggccaggggagttcattttatttaaaatgggttccctttatggagagctggcctggatgctgggcaccatcaatgctacctgcactgggtctgcctagcctgacctgggccacagctttctgaaatgctctgtgacctccttccagccacctattcaggttttcattcaacaaatattttggcacacatactatgtggctcaaggttatgtactgtaacatttaaacttatgcaatgtgagccaaatcgcctgtctttgaatgatggttctgcccccaaactgggtagttagtgaatttcccttgcttcagttcttcctggtattaccctccatcttacaaaggctgtcatgatgttaagaaataaaaccggttaagtgtttagaatggcagtgagtaggtccccaagggtccctgtcctcctggaacacacattctaacattcaagcagagtgaggtggctgggggccagttgttttcaggtcccccgtgtccagttcaaggtctgcacacagtaggcattcagggcattttatgtgaaccaagcacagagcacacacacacagactcacacacatgcatgcacgtacatacagatgcatgtgcgctcatgcacacttgcgacctagagcctctggtagagtccaatttcctgggtaggtaggtgaagttttccagaccagtttaatgaaaaggcagctattcctgggtcctggctttatgcaggcatcttggttccagggctgtctcatgtctggcccttggagtttccctttttgtagagcttggctctgccttcaaaattttaaaaattgttacgtcctgcttttctatgtgcatggagtgggagataactttgtgttggctcagtccattctggggatggaactagaaatcatgagctgaattttaattttacttgctcatgtcctaccttgtttctcaaagtttttgaggtcgtttatatagacagatgaacaataaatggtttctaccctcaaggattgtatagtctcttctgagggtaaagtgtgtaagcaaacggctacaataaacaacagcagaaagaaatgcatggtaaatggaggaatcagttaaacacggggagagacagagttgggctgagcgatcagctctcacctgagcgatcagaaaaggctcatggaagaggtgagattttcagtgaggtttgatggagaaggagcatttcaggacaccaaaggtggggaagggaagagggcacagcatgagcagagggcacagcgttggcagaggcgcagaggcagggcttgagtgaatgcgaggggtgctctgggagcagtgagcgtgctggcggaattgcaggggaggctgtggaggaagtactggatgggatgggaaaggtggactgaagatggtaaaggtggattgagccagattatggggaactgaaggctgggtaaaggccagatgttaggccagacagcttatgcagttatgtatgtaatccccagagttgccttacatgttattatgcctattttagggatgggaaacttagactctcagaagttacaagatattctaccataaacaaatgattatcccaaaggattcgatcttagatctgtaaactttaagtctgtgtgactccaaacttatgacactgctgccatgaggcagttcaagaaatagggaagttatgaaatgcagcggcaaggtaggtccgtggtgatctcccgggtgaggcattggagtgatgatgaacactgtccctcctccttctaccctgccccatcactaccatcaaaaggatagaggaaatgacaagctgaatggaggttaaaagtaaaagagaagaagggcagagagacatcaatgcaaggactttgtgaaggcttagcggtggagggcacaggaaaagggatcaaatcgtcaacccacaaaagacagtctgggaattatgcctcagctcacttgacagaacagagtctgaggtgcagagaaaggaccgcagcttctgcctctgtgcttgattgagggactccttcactcatgcactcaacatccaatctcctacatgcccagcactgagggttatggagaggccaaagacacagaaggtgagggggaagatattgagcaagtaatattacatatgcaagtgcaaaaccttgtttatttctctaagtgacttggtgtggcagatgttaccatccccattttacatataagaaagccaagctcagaaaggttaagtcagttgtccaaggtagagctgggattcacaccgaggtcagtgtgctaccaaagcccgttccttttcaccagtgctctctgctcccctgctgtaatacctgccctccaaaagcttacagagcagagggatggcaacattgattgccccaaggaggacactttggagagtgaaagcaaggagcccactcagtattatgccagatgggaggcaaaacctgacactgtcccgggcaaactgggatgtagtccccttatactaaaaaggagttatttatatttgtgtgaggatttaaagttcctcagagcctgttcttactttcagtcatgtttcatttatatggcaaaacaagaaagtttcccagcttgctgaagctcatcctttcaaacacttccagagcctggataattctggatggtaagcattgaaacgcagcactggttgtcctgcctgagtagagagccctcaacctgggttgtccccgggctggccttgctctcccacttggctggggagggctcccatggcttgtggtgtcaggagcagagctctgagaaggggaactccatcatagcccctgccccaaaggttgctccacaagactggcattctcagactctaataagttctgtactgggctttctgtggctggcttccttcagagaaactcaaaccagcatcaactaagtcagagacttaggatagcagagaaatattaccacaagaaagatgagaaggccctggaggtgagagggggtctttgagctcagtgagttcaaactcttcacattatagatgaagacactgtgactcggagaagaaaggtgacttgcccagtcatatgctaataagtggtaaaatgggactggaatgtgggttttctgacttccaggatgaagttcattccgcttagccctgctgccctcatgaacgtcctgctcatccttcttccaccccagctgcccaggacctcaggaaagtgcccggaacatgccccgctgtctcatccctccatgcctttgccactgctcttctgcctgcctggaataccctttccaggaataccctgcctagaaaatactttcccctcttcaagaggaagtggaagcatcccatctgggcagccttacttgaatcactgtgccttactctgcctctctgggtcttgttcccggattaatttttggtatctattatagggtggaatttatgtgtccatctctccatttgactccaggctcccagagggcaaaaatttgctcttgttcatctctgtatcccactgccctgtgagggcatgtagcgaactctcaatcaatgttactgtattgaatggaatgagaggtatgacaagaggttgggaaggggcaaagatggagccaggcaggaggagacaggctccgacactgacttcctcatgtcaccatgttgacaagggaggccctgtgtagagaaggggtttagaacgggtctaagggagcagggggagaggcaaggggggctggcaatcctagagactgctcaaccctgcctctgcctgttggagtcagcctttggaaaagtactagtgaattaaagcccaataaaaaagtcaattaagtccaaactcatttatgccttaagctcctccaagccagtgagctggaatgcaagctgggccaatatttctccatttccctccatgtctacattggtctccagtgaggcagccgtgacacattttatttcaactataaatggggcagatagacgggtagcaaagtaatggctgctgggggctctctggatcccatccaagagattcatgtcagtgggcgtaatgttcatgtcctgaccttgggctctgatagagcatagggaatctgtgtgcttgtgcatgtgttcccgtgtgcacgtgtgtttgcatacatgtactgggggtgtggatgtgtctgtgtgcactattgtttgctatatataaaagtgcaatttgcacatttgtgtgttgattcatccatttattccacacatatttactgagcaccagacactgtgcttgcctctggtgttctcaagatagagaaggtttcagctcttacacttatgggttatacggtccagaggtctagaaaaatacacacaataaaacaagtaatgacaataaagtgtatagaatgttatatgaacacaggtatgcacatgcatgcttgaatatctgagtgcatacatgcttggatatctatgaatgtatgtgcatgaatcaagtctcttctgtgtgcatgtgttttgtgtaagctgaacccagctgacccatgtcgtggaaaacttcttctggaagcccttgcaaaccagtgatagctaaagtgatgtgatttgtgtgtgtgtgagttggggaaagatgagaagaaagaattaaagttgtcagtggtatctgagtctgaagaaggggcaaaatacttaaagagtatgcataacccatggcttctccactttcctttcatttccccttgagctcatatgaccattgctcacccacggaaccctcaggaggctagggctgaccctcattgttgggatagatggagaaagtctggactagggtaacagcacatggattctattcccagtcctgctgctaaataggaaattcattgcaaaaagggatgtggagttaggagtcccaaacctgcctttaccagctgtacaaccttgggcaagtttcttaatctctctgagcctcagtttcctcatttgtaaagaaagtgtaataatcctgtctctatctaccatcacaggactgctatgacagtcctgttctaaagcacccatacagaagtggaacgtagctaacatttctaacagttattgttcctacacgggacagccgcctgctgctgggcctttctaaaggaagctttgactccactcacatctgattccttgcatagcattttgctaagtattgtccccaaaatactacttctatgagatgcttaaaggaagaaaacaagatgctgtggtctaataggttagaaaacgctgggctagctagggttaaagatgtttatttcttacagaacttatcagaggctttattatgccaatgtgcattgtgaatctccaagtgggtggcagagcatacaccacttctgtctgagattggatccctccaggggctagaatttaagggcaatggtacatttgaaggtgacttcaggaagacctaggaaaggagtgcagaaatgaggtggggaagggaagacaaccaatatagcatatatttggagccagttcctgctatggatgactggggcttagccctgcaggggacctctgagagatggtgaaaaccacactgcagggttggggaggaagctgggctcattcctatttattgttggttgagagctactcttggagtgttgccatcccaggagttttggcctgctcagtgcttacacccagagtgtttccatggctggcagatgttcttgggcagaaagtcactattctcaggaagtgcctgacagcaggaatagagtacatggaggtgatatgggacagagcactgaaagcatctgctgcaagttcctcacctgacttgttctccaaatgtacaaaatccctccacagatgagccctaatctatttttcaaattgtaatctttcccactgccttttagcctaaaagacaggctgtgtggattgctacagtgggagtggattgctgcagtgggaggggtgaacacaaaccatctctcttctaacttggatttccggtgacctttaaaacatctgtcacttgatgtaccttatggaatagggtctgtggctcacagtagggcagaggaatccagcagtttgggggacagagggtcctgggaggtggttattcaagaggtctggcaccaggaaagccagaattcttgctggaaaagccaagattgagactggaaagtcagagttaagctttagatacaaagtgccagcaacaagcaatggatgggctaaggtgggagagcctatgtcaaatgtcccttccatgagccactgcttcaggagttgtcatggtgtctcaagggagccatgtcaggctgcacagagaacatcagagctagaagcacaggaaccctgaggattatttaacctttaaattatctaacatttaagtacaaggaaaattgaggactagagaggtgaaaggacttccccagagattacacccagcaatttaagagcagggcatgaatcagaacacacatcccttgctcactattgagaccttcactcggaagtccttgactagtacacttcttcctgccaagaatttgaccattgcccgtggattttttgatgaggaaataatccaagcaacatccctttgctccagccccttcctgccccaccttcctgccatcagcggtggcaccgaagccctcccttcacctttcctcttacttcttcatattcctcggagggctccctgccacctcaggtagtaataatatttttgatttttagacatgccagcaagtttttccaggcaatgtgaggagcacaaatgctaatgcctccatctggggattatgttaatatactatcttgaattgacattttaaaaaaatgcatattttaactggctgccttttctgtctccaagtccaggatcacatagtatttagtgggatggtagaagtggttagagaaaggccctgggttgggttggaagtagtgccagcctggggatcagaagtcctggaattcagtaccctggcatgtggccttaggtggggcacttctcatgtctgggcctcattttcctcaattgtaaagtgggagggcagggctggacaatccctaaacctccttccagctctcaccatccatggcttttgactgtcagagtctcctcaaagctcttgccttcttccatcatctttgccctggattccagggctgccagcaatgtcacctctccctgaccttgggactgttagtttatatgctggggacagactctttcctgcctacctgttatctctcttggacttacctccctaaactctcaacctgaggccagccccctcttctgactggagtgaaacatggtgaggatggagctgtttccagtcccttccccagatctattctttctctgaagcccaaagtaaattttcttggaaaaatctttcagtccattctgtgtccagaatttgctaaatatgatcccctttttgcttatccaataattggtgactgttgtgggcaacactgttttgggcacagccccccacaaccctttccttgatgttgtcccacacttcagtgaccaccttggccaggcccccaacatctcttatctgggctactggggttcccctggctctcagccttgctctctgctggtttgttgctgatgctgccaaagtccccttcattccctgcagcagcatgtcccctcctgctggtctctcagactgggcccctggtttcaaagactcactcccagacacccctatcatgggccatgccttgaagagtacctgtatacttcccctcccttctttccccggagagacaagattgcaagcttggataagtgcagaactaggaggcaggaagaaatgagtgtcagcctgggtcctgccattagctattgtgttctaatgctagtcccttcacggtacagaaactcagtcttccctaaaatgggactaacacgttttgccccatctacctgccggggttgtacatggattcgtaaaggagaatgtgctatacagaagggattatttgggtgttttttcaaatgtcttctgggggccagctgcatcagcactacctggggatagtaagaagatacagattcctgggcctggcccagagctactgaaccagactctctgataataaggcccaggaatctgggctttaaataagcttctcaggtgagtcccgaagtctaaggctctctggttattgtgatggtagctggcactcccagattgtgttcccacctctccctttggctgcttggacccactgcacatgctctgaagacttgatttgtgcctagtgtatgggcagcttctctccactccccagtgctgggataatttttgagtacatcggagaagcaacatggtgtagtggaaaaagcaggagctttggaattagaccagtatttgaaccccagctctgctactgattatccatgtgactttgggtaaattgcctgactccctgagtcttcattgttctcctttctatgatgggaattacagcaattatctcaaggctgtggttagcattgcaggaaatatatatacataaagtagctgccacattgtacaagcccatgaaaagctatttcctccacccaaggggccagagacctgctgtgtttgtttaaggtgggtgtcacgtcacatggtgtgtttggactgaaacccacaggggacctgatttgggaagcctggcagcaagtgtaagacttttgctgaattccccagagcccaagccttgtcctgaaagagacccacggctccctgtgcaggactattaaagttaaataagctgctctgtgagacatgcattattaaaagcatgctggactagctgttaagcccagccagggctgcctcagtgaatggggctcccctggggcacattccatccgggccacaaggcagaaccacaagacagaaccacaagacatggacacagcatgagcacagcctttgccctggatggggcagctaagcctgagcagagcaacacagtgggctcctgcagagctctgggggctctgagttgcagcttttcatttgcaaagaaagagagtcgcctgtctccctcattggactaggggctttccaaggacagagctgtgtctctcgcatcagagagtgagtcctcttatggcagccatcagattaggtttcttgggcagggccatatctccatcaccagattgaaggactcctccccaagggtgaaggctgcttgtgatctttgtcccagaaagtatctagagcatccctttctcccagcctctaggctcctgcagccctgagggctctgccccttgctttgtaagcagtaaaaaagcagaaggcaaccagctttcttttacaggttgttgggttttaaataaagatagttaaaatgatttatattctgctcagggggaaaactggggagaggaaggaggagtaggttttcctggcaaggaaaagcggcataaaatgtcccactaaatgctcactcagtggcctccattccttcaagcacagagcaaacacttgtgatttaagctacacccggtgacaggttagtatcagaactgtgactgtgggtttgacccaaacactttggtgttgtaaggcttcccagaagacaaaggacagagagggaagagctgattccagggtgagaagaaggggttcctagagggatggcggtagctcccagcagatataattcccattacatgggcttcaactcttgtccattaatttatactctgagctctaggtcaagagcttgagtaggaggttgacctgagcttctcccagctctgctgttaactcatcatgtttccatgcgtgaacctcttaccctcatgaaacctcagtcattagtgacttgtgctttcttaaaaacaccatctgtaactatacagggtgtccatgaagtctgaaaacttaggtgaatgtacaaaatagcaataaggacatcttcaatttgttacaaaatgaaatcgtatctatgtttgcagaccctattggcatatatttatgtgtgtaagattattttataaatatctgtcttctccattagactacaaacccctcaagagcaaagaccaggagtttgttctctgttgctttttcagcactctgcacagtgcttggcacattctgagagctccatacatagtaattaaatgaattaataaataaacgaatggcaaggtttatcttgggaatggggaaggtaatgaaataaagtaaggactcaaaagtgagctttgagaggatgtgctcagatgtttgagacacccagctcattaactggactctttatggtgttgagaagtagcatttctgcccagagtatttggttgtgataaaagaggtagtagagaggtaagattcaccatgcagaggcgaatccactcttatcacccagctgcttctgaacatttatagatcccttctctgtcttcaaaggatagctgtattcttttataaaggattagactcttgctctgagaatttgaactcatagcaggtcaatgcacacccagccaggggtcctcagcaatgcagagcaggttctctctctctgaagaagacagagcacagaaagcacaaagaacaagtgaggctggtatggggctctggggcatatggttctcttggctggaatgttaagtccctcactagtccacttaacttttcagactcagttccatgaccacaccctctactcaggtagaactgactgccttctcctttgggcctcactggaaatataggtattattttatcatgtgtctgaacataccagcaataagctatttattatgtatttgtcaatgtttctagatgtggtgaccaccctctatatgtatcccgtagatggtaaatttccttgagtggttggtgtggccagatgaaagggttggtcactgtccatggtcctgaaggctagggctgagtgtcttccagaacactgaatcatggatgtttccctaccttcttccacatataaaccaaaaagctcaataagggcttagtgatgagctgcgagaagaaaacatgggtcccagggtgacccaaagaaggatgtgattggttctacctgttgcatgtgactccaaagcctgccagcatgctacctgatgctagtcaataattgagatagcagtgtaggtaggttgcttagaccgctgagtctttcttagatcatggatgctagcttcaggtgaaatgtagatatcttgacatgtagatatctcaggtggaccacatttagggacaaatataggttggacttgaggtgtgctaaagtcttttgcattctagggagctaggaattgctcattttcaatagtattaatctcatgatgaaaagtaattattacaccctttaaagcatttcacatgtagttttaaaagtgcaatttattgaacacctactatgtgccaggtaccatgagagttgcttttgtttctcatatattatccctaatccttcaaataacccagttagaaaagctattattaaccccattttgggaagaatagaaaattgtcagaatggccaaacaagcagcccaaggtcacagagccagttaacaactgagttaactcctgactgttggtctctacagacagtctatgtctttttactagtctatactaccgaatcttttaccaactgcctagcaacagaaaaaatagtttccatagcaacgatagtaaaatcagtattggcatttggataatccaatttttccaaaaaaacccccataaaacaaaaaatccaaccctaagctagtattccacatctggaaatgtaattgaagaaaacaatcttagccatggaaaagatgtatgcataaaggaatgtactgaagcattatctacaatctttaaaaaagttgcaataagaaatgtccaacaataggagaaagattaaatgcagtgtggtgcatcattcagtgtagtaaacatggtctggtataatatggtcccacttgatgcccaacccttctctttctaggaaaggcttccattttctgggaaccaactccccctgggcaatagtcatattataagaccctactttcctgagccatgtgattggtccggggtgggcacctcatccaagctgggccaatcagttacttttctggaattaaaaaacaaacaaacaaaaaaaaaaacgaaaaacaaaaacaaaaacaaaaaaacaggtttagagactgctcagtttctttttgggaacatggaatgtacagtaatatcaggaatatggctggccctgtcttgtccctgtgcaatgagggcagaagagggggcccatggtgagagagggaaagaacaagagtgggggagaaagagagagagcgggtgggatagggaagagaaggggatgggaaggagttgggtgcttgtgagcagtaaaagcaaaagtggagtccctacagcactccatcctgcttccaagtcttccaagagctcaacagcacttgaaccctgtgagataccctagcattcttccaataaactcctccctttacccaagccagttagaattagatttctcttatgtgtaagtgagagagtcctaatttaaatagtaggggtttaataccctgtgtttttaggaagaaaatgtagggctgcctagggtgaccgatgcataattccaaggtggaaaacctctgggcccacaagaagcagcctgggggagaaacttgacataaccagaggagaaggtgtggtgtgcactgagcccagagctcatgagggttggggagctgggacacccactatatgggtatctatcatgactttaggacatgtacctagacccctacccttccagaaaactcactctcctgaagatactatggaaatcagacaagtagtggatgaatccgatctgagtcattgctccttcattttcattggcctggaagctccatgacaatcaaggttgtctcctattcagctctgcattcctagagctagtacaaggcctggtgcagagcaggtgccacgtgagtgcttactctcctccaggaggtagactggagttgcatttcagttcccttcttactcaatatatggggttgctatttatacatagtctctcagcttcaaacccttctatgttcttctttgatggtggggccaggactctgcaaactatattttctggttccctcttcccaggagactggcaggcctgggtggactggggaaggcagcctctaccagcttccagctcaggtctgcacccttctggcatcaggggacattgatggtcctagactccagtttcttttggcattcttggcaccactgcagcaccagcgttgccatgcacctcgtcctctgggctgccatccctgcctgcggtctgagcaactattgggctacatgccataatctctttagcaactgcctggcatcacctcccgactagatcgtagtaacaccatttcttccctttccttgcccagccctagagggtggcaatggcttcctgcagagattaatctccaggttacctcactgctctcttttggctttttcagacttctaacacatgcataagatatttccaacattaaatagcctttgtttcaaattccttacctatttccgtatttctgacaatacgtgatttattttaactttttttgaatctcaatttcttcatctatgaaaatgagggaataatccttaactcttgaagatgttgggagaattcaatgacatgataatcaagtacctggaagaataggtgcttaaaaatgctggttactcctttcgccccatgaccaaatagtcaacctgtctatgcaggaggctttctcctcttgatgacttgctgaaagaattggtggcaagggcacagggcacaggaattgtgccctgagcagcaagaagccatgcttagtggagctccctcaccctcccgccacagccgacccagagacatggccagtggagatccatggccaggtggaggcaaaagtgttcagaatgaatagtgtcttcaaaacatttcctgctcttagcacccgctatcttagtcacttgagcagattctaatttagtctcagaaatattcttcaatggccccaggcaggtgctatatttcatgacagagatgagaacaggaagctcaacttcccgcctcctcagagtcaatgacgaatccctggaagtcagcagaatgaggaaagggggaaaagctaccacccacaggacagttgaatgaatgagcaactaaatgaataccactgggtactaggctctagctttggggcttggaaagcatcttctctcattcagtcttcacagcaacttacctgtccatgttacagatgaggaaattgaccctcggaggggttaggaaggtagcccacatcccagaatcaaggtggcagagtggggtttgaagcccacttggctggctgcggacctattctctaggtcctcccagagggcacctggctctgactcaacttcctactatcaaaaactaggaaacaggttggctctggaatctgaataggtaacactcagatcatatttcttagaaaccaaactcctagtttgctcacagccaaacagcctgaactgagctaagacaagagcatcctgtggagatcaggcagaaagatctgtgcccagctcatgcctctggagctcggagacctctgtgccggcagaagacagcatcacacctgtgtcctcatctgctcgaccttggctttcagctggctggtttgcaaagaacagccgaggcctaggccagaaggagagaaggaggaggatgcatttggaaggacctagaagttacatgataaatgccagaggcctggggctatctgcttgggagctcttattacttcagtcattctcaggggggaaatcagctcatagcaaacccaacctgagccactttcctgtgctaatgtcaatcaacgggtcaaactgagtaattctatttttcactgctgctgtttccattttgctccttgatatcttctaaagaactatactcccctacttggaaaatgtgcttgcttatttttattccacatctgaagtaagaacttaataactatcaagtctgggtaaggctaggtaaactggacaatatgacaagaatagggtagatggcaggagtgctattatttttatcattgtagaaacctgtgaaaatttaaatattttagaacacataaagtggatggtaaaaactgcaaaaaaagcagacttaaaaagtaaataagagaagagagaaaccagttgaagcaaacatttgagatgagctagtaacagtatgtgcattgtggattcagatccaaatatcctgatagccaatgtccaaaaaagagaaacaattttcattgtttgataaaagacatcatacaagttcagctggtacttaagtctagaaagacaggtgggctgatgttgtcttactcaatagaaacaactgcaactttgataacattaatatacaccagtgtttgggccagaggaagtgttgttctctctaacaagtttcaattcagtatcttttttttttcttacatttaattggacacagcaggattgtcctagagggactacggtgcagcagcacagaggaggtaaaataatctttctgtgtttgtgccataggaggatctgctaataatttttctaatgagcaaaaatgaccccacactacagtgaaatcccgggccagtgccaacttagactcagctggcatgcaggggaagcaaggagactaacatttattgaccgtggcacatccatcacttttaaatgcttgcaacaagcctgtggaccccaatttagctcctactcaggggcttccctctccaagttggagctgcgtgctgtgggcgctggttttcatcacagactggaggaccgggatgcatagctctgtatgttcacttggaatcctgcaatatccaagcaggtgaactttggagacaaggacacttcacgctactgaacagatgcaggaagtgaggcctggagaggggcaaagaccagagtagaaccaggcttttcatttaagacaacaaatcaagcatccctaaaatgtaaagtaataataacaacgccttgtcagtatataataggagcacagttagcaaggtgcttcacaccttctgtgccgtttcatctgtcccacaggttgacagggagataagcagactttatgcttttagtgaatgccatactgcacaaagaaacattgacacataccatatgctacccacataagccagcagtgattaaactcattccacaggtaactgaattggggttcaggaaggagaaatgaactgcccaaggtcacacaggaagtggcaaagccaggactcaatcaaggtcacccaacttcacatttaaggtttgttcaatcctaccatgattcctttcacctaaacattaggatgtgcgagaagaagcacacttgggtatcaatgcatcatttccaaagtgcacagtgactaagatcctagggccggaggtcaaactgcctgggtttcaacctcagttctgccattaccatggctgtgccatttacttaaccttactgtgtttcagttttcttacctgtaaaatggaaagaatgataataaattccatacttctttattatgaaaattaaaagatgatgtgagaaagcatttagatggatgtcctgctcagacctcaaaaaatattagctcacagtattttttaattataaaagtcataataaaacagttgtatcaaagtaataagaaataaaaagttgttataaaaaataaaaacttgaggccaggtgcgctggctcacacctgtaatcccagtagtttgggaggccaaggcaggcggatcatctgaggtcaggagttcaagaccagcctggccaacgtggtgaaaccccatctctactaaaaatacaaaaattagctgggcatgatggcaggcacgtgtagtcccagttactcaggagactgaggcaggagaattgattgaattcaggaggtggaggttgcagtgagctgagatcatgctgctgcactccagcgtgggtgacagagcaagagtctgtcttaaaaaaaagaaacaaaaacaaaaacaaaaaaacaaaaaacaaacttgacatatatcttttctgacatttcagtttcagatttttgttttgtagaaaaatgggaaatatagaaacataaagaaaacaaaaaattattgtaatcccaacacatagcaataatcataatgttttggtgtttttccagctgtctttttttctaacatatgaactacaaactttgtttctatgtgttttttatttggcattaaaacatgggtattttcctatgcccctgaatagttttttaaagtataactttcagccattataaaactatgttcttctgtaggtggaccataatttatgtactcattacataatgtttgagtgaagttgactattctttcatcattgagtgaagaggctacgtcagatttgcagctgcctctctgacactaacacagtgacttgtatatagtagatgcttaataaacattcaggtgactgaaaactcatgttttgataggtgtttccagaaagttcataccaatttatattcctgcatttattgcatgagtgtctttcacatagtaatctcagcagcatttgacttaaaaattgaaaaaaaaatttgccaatttgttaagtaaaatatgggacatcactattattttaatttttaatttatttgatcaatagtgaggttgaaagtttattcatattttaattagccatctgtattgtatttttcccttttccttttcttcctttcttatttttgtctttcccaccttcttttgaaagtaccattcttgaaggaacaggcaccagactaacagtcctgatacatttccttggataccctcacatttccagataattcatgaggttcataacaatgaattgggtgcttgctaattattttaagataattgcatgaataagttcagatgctcattaattctgaaagctgtgacagctctcaggtattaatgaatttcttactcaagtttagggagttggcagttgacacacagctttcctgacatttcagcttcagattgccattttgttttcctgtaattccatgcacaccttattaaagttcaattatggcttggaggaaccttcatctaaggcattagcatccagttaattactgagaagtgatgacaattgaagacaaatggatttcatttcctatcatgacaccagattccctcccaccacctgcccagtacaggtgcacatttctttggcacggatgccctacttgctgttcagggaatcacagaacattctagaactacaggagtcagaatatttgattttttgcctccaaaggaatgctcaaatcctcctggaaagatgttgtccattctcttcttggaacagctttggaaaccaaaggctagcttctactaataatcacttattccaaggtcttattattgataagcaataagttcttttttaaatcatagtgaagtctttcttgggggtgtgggggttcatgcctgtaatcccagcactttgggaggctgagggggtggatcacttgaggtcaggagtttgagactagcctggctaacatggagaaaccctgtctctactaaaaatacaaaaaattagccgggcgtagtggcgggcgcctgtagtcccagctacttgggaggctgaggcgggagaatggcgtgaacccgggaggcggagcttgcagtgagccgagatcccgccactgcactccagcctgggcgacagagcgagactccgtctcaaaaaaaaaaaaaaaaaaaaaaatacaaaaattagctgggtgtggtgtcaggcacttgtaatcccagctattcgggaggctgaggtaggagaattgcttgaacccaggaggtggaggttgcagtgagctgagatagcaccactgcactctagcctgggtgacagagcgagactccatctggaggaaaaaataaagaatgctgggtgtagtggctcacacatataatcccagcactttgggaggctgacggatggatcacttgaggtcaggagtttgagaccagcctgccaacatggtgaaaccccatctctactaaaacacacacacacacgcacacacacacacacacacgcgcgcacacacacacacacacaattagccaggtttggtggcctacacctctagtctcagctactctggaggctgaggcagaaaaatcgcttgaacctgggaggctgaggttacagtgagccgagatagcgccactgcactccagcctgggcgacagagagatactttgtctcaagaaaaaaaaaaaggttaaaaaaagagtgaagtcattcctgctttaatttctgccactgactcctacgtgaccttagaaagttctcttgtggtttcctcatttctagaatgatggtccttgtgacggtttgaatgtgtacccagaagttcattcgttggaaacttaatccccaatgcaacagtgttgagaggtgggacttttaaggggtgtttaggtcacaagggctctgctctcatgaataaattaatgaagctattgtgggagtgggtcagttatcacggaggtgggttcctgataaaaggatgggttcaccccacttccctgctccctctcatgtgtgctctcttgcctgtcctccttctgccatgggatgacgcaccaagaaaggccttgccagatgcaggctcttcgaccttggacttcccagccgcggaactgtaagaaataaatctctgttctttattaattaccaggtattctgttatagcagcacaaaatgggctaagacacttctggagtaatcaccctgtgttaagtcataattctaaagcccaagatgtaagtaaagtgcttcatatatgagagttgcttaataaatgttgtttcccctttgtgaaatgccttttgttgcaaaaaagggataggagggagctaacactgattaagggtctaccatttaatgtcatctcctctggagactttccctctaccatcttaattagtactgaaaacaatcctgtggagtagataatattattatctttattttacagatgaggaaccaaagttcaaggaggttcaacgtcttacagatttggtggtgcacttgctcttcccactgcccagtgaagcgctactcgatcatactagacacaatgtggttggtctatgggagggagtatcaggaagcatgaggagcccacacttctacaaagagtcgagatgccttcacaaagatgcctcatgctgcaaggtcgtgaatgccaagtgctctagtgtttcagaggtggaggagatccctacagatgaggcaccaggaaaagcttcaaggtggaggccggtctgagtctggcctcaaaggatgaaatgattcagataaacagcaaaacaaagcaacaggaagggagagataacaacaaaggcagagatgtaggagtgagcaagggagactgaatgagcagtccctgggacagaaggtgtgcacagggaggtgggagagagagtgctaggaagggaggctggcacatggaacatggagggttttcagtgtcatgttcagggctttggacttgttcctgagacctgggtttcccaaagggagttctgctactggggagagcctcagaggaaagaataaaacagaattccctgtacatcatccctttcctggtgagttacaatgcacattagcatgttacgtggtctgggcagtactacggaaaagaaaggcatacaaggtatttatttttttaactttccactgggaaatttccaattaaataaggttgaaaaatcgaacccagcagaggagcaatagaaaccctcccctccgaggccggaaggtaattcagtcacccctggggtttctcttcctgagaagaaatcttgtgcctgtggcttggatggctgcagctacttcctcccaggaggccccttcctggctttctttttcctctcagtttccagagtttgaggctcgtaaagctctttattatgcgtaactcatgtagcactcagatgggatggtcatccccattgcagagatgaggaaacagtctcagaattgaagcaccctcccaagatcccatagccaggtgggggtagagccagcatgggcacccagggcccccagtgtggggttctccccgatgctctgccagctaactcctcccctgtcctttctggggtgaccaggcttccactccactttaaggagcgatggatgtagattggctttatttgcaggggtgagagtgcacttgggaaggaagatctggttccatgatttgggggcaatatgatcacaggctaataactcaagagttacatgaggaagtgggggaaatctagggaagtgctttacttattttttgagtgcttactatggtctctacactcatgaacacattccagtctttggaaagtgggagggaggcatggtgtctggtttcttgggtgcagtaatggtgggctttcgtctactattttgacgacagttttgcagggtttatgctttcacaatttaagtgatatatgtttcccaggtatgcggctgatttcatgtctatggtgaacactgatgtctcatcccatttcccttcaaggaaagacagacctattgccctctgctatcagcagaggtctgtgacatcagctcccttagggactgcattaggctagagagaggagctccacctaagatcttgttccttccagagacagcccacgtccactcttgatccatgtgaatttggggggcctggccaccttggcccaacttgggttagctctgaagggccactgagatccgagctcctgcgggtttggcaaggtttcctgttgggtctggcaaatcacagtttgacttctccccactctgcttatcctgtttccttcccctctggtcccaagggtgctccttcatgaacatcctgcagactgaactctacctcagggtctgcttcctgggaactagggtgaccaggcatcccagtttgcctgagatgtaggaccaagacagtcctgggcaactaggatcctacagcaaacccaacctcagacaatgtacttctgtttattattgttatctttttgagaggcagggtctcactatgttgcccaggcttgggtgcagtggctattcacaggtgtgatcatagcttactgcaacctcaaactcctgtactcaagaatcctcctgcctcagcttcttgagtagctggaactatagacatgtgccaccatgttatgctgtgtctatatattctaatactttcatggcaacaaattatttcattctttaaaaagttggtagcagggcatttgccatatcccccttaatgcttccccaacaatatcatgggaatcttggggagatgggtattatggttattatctccccaatcttggtgaagcaggtattagccctaggaaattaggactcagagaagttaagaaacttttcccaggccacacagcacagtagccatgccggaatgaaacctaggcctactgagtccaatgcctgccctctatccaccaggcctctttggttttaagacacgcaccttggccgtgtgttccaaacacagctgtaggtaactaaggaggcagagaagagcagttgctgaatcccaaacatgcttggagctttttgcaaaataaaatcgcactttttattcaatgcctaccttcccatgcaggcctagttttaagcttctgaactttctgctaattactgtcacattaattaaaaaataaatcctttttaatttcctaacaggtggtttgtgaggctggaagaggagttgaaacttgtttgtaattattgtgtggtgtatttgcatttctaattgcgctgagggacactgaaggccaagcttccagtctctgggctgtctttcacctgcgccgcggtgctgagttgttggcggcggcggcagcgtcttttctccaagcagcacctgtgagagcagcagctccagctggagtcccaagacttccaatcaacatagagagccacagggcctgtgcctgcgtgggtttgctgtaaggagcctgtaacgcatcgaggagcccagcgcccaaccccacacctggcattggctgggtgctcaataaatgctggctgaccacggctgttcctgaacgaatccttatctcgcttatctgattcaagcgccgggtgggcgcactgtgggctggcagcaagggttcctgatgccaggactcttggatttgctccacaggtgtctgcgcatccatctggaaactgagcatctgtgcagggaatccatttcctcttctaacttctgaatagctttagatacttctgacttctgaacccctttagatgtatgctgtcatttaccaggaacatcctaacattgatgattgaggcttctttggccatttctgcctccacaagccttactttttttttttcttttttctcttctttctttctttcttttttttttttttgagacgatgtctagctctgtcgccaggctggagtgcactggcaggatctcggatcactgcaacctcagcctcccgggttcaagcaattctcctgcctcagcctctcgagtagctgggattacaggcgcctgctaccacacccagctaatttttgtatttttagtagagatggggtttcactgtgttggccaggctggtctccaactcctgacttccagtgatctcaaagtgctagttacaggtgtgagccactgcacccggtcctccacagcctttctgtaaaggagttaatgagccgcagagtactacttgagtgcattgtaagcactttttacttaaggccccaatttaatgtggtggaaggattacaggctttgaggtcagacctaccatggtttgaattctggctctaccacttagcagctgagagactggagaaatcatttaacctctctgggcctcacacagcttttaaaatctgtcagatggacaaaatcataacttggttctgaatttctcaaacttagatacacatcaaaatcacctagggagcttgtttttttttttttaaccgagtctcactccgttgcccaggctggagtgcagtggcatgatcttggctcactgcaacctccgccctgccagttaaagtgattctcctgcctcagcctccctagtagctgggattacaggcacctgccactgcacctggctaatttttgtatttttagtagagacagggtttctccattttggccaggctggtcttgaactcctgaccctgtaatccacccaccttggcctcccaaagtgctaggattaggcatgagtcaccatgcctggcttagggagcttttaaaaatgatcagcttttaaaaataatcatcagtaaatgctggctcggtgtggtggctcacacctgtaatcccagcactttgggaggctgaagtgggtggatcacgaggtcaggagtttgagaccagcctgaccaacatgttgaaactctgtctctaataaaaatacaaaaattagccaggtgtggtggcatgggcctgtaatcccagctactcaggaggctgaggcaggagaattgcttgaatccaggaggcggaggttgcagtgagccgagattgtgacactgcactccagcctgggcgacagagcgagactccatttcaaaaaaaacaaaaacaaacaaacaaacaaacaaatcagtgcttgggttaggctgcagccagaactgattaaatcagactggggagacgggaggaagggaatattggatatcatgattttaaaaagctgtctgggtgattctgttaggtagtcagggctgggaaccactgcctgagcctcttgacatgctcagacaatgctggttcaaccctttccttcccttgccttgggaaatatagcctggctatagtggttctgggagcagcgggggtcccaggcaggttactgaggctgagatccaagaggtcaggatggggactcagggactgcaactaactcatgagatggcacgtggtcaaggcaaaaaaacccccagcactcccctcctcagtgtccctctccctggtcagtgaaatgagagttcattaccttgcttgtccaactctagacacccccagggaaaccaaccaatcagggcttctgacaaaatgaaggccaagaatgatgtcataaaggaaatgatgctaagttttatttcaggccagccttacatctcttatctctttgatctcatcacaaccctgtaggataggcaccgtgatgcccattttacagatgaataaaccgaggctctttgaggttaagtaactatgtatcctttaagtactagagccacaagccaagcccagtctgtccaattccaaaactcttcatctgcctcctgtacatgtggccttccttacatcagtaaatagcttattataagtaaactacatccttatagtttcttgggtcagacatcctggagtcacctttgactcctctctttccctcacaccccacatctaacccattgggaaatcccactgaatctgtctttatgacatatcaagaatgcaagcaggttgccacctccctgctcccaccttggtctgagcacctccatatctcacctgaaataatggtgggtctcaccacctctgcacttacccatgttgtgtacttgcagcacagcagctggagtgctaataacgtttccccgacactgccctcccatggcttccatcccactctaagtcaaagccacatcctcaccatggcctgtactgccctgcaaaaggtagactctctgagctcatcacctaccacttctccccaggggctcacactgctttcctgaaagctctccaagtacaggcttctgcccttgctgttccctcctcctggaatgttcctcccccagcattgacatggctttctgctctcccatcctcgtggttttcagggtgactctaatgtcacctgtttaaaatggaaatgaacccaccagcacaccctgtcctcctctcctgttttattttttctccgtagtgctcatcaccatctggtatcctaccagtataaccctactgatttgtttattgtctgtcttctgtgattagatcttcatctctttggctcactgctccatcccaggtgccttgtacaatgcctagcgcataggaggtgctcagcaatacttgaatgaatgaatgaatgaatgaatgagtgaatcctgccaccccctcaagggaaaggtgagatgacttctgagcagcggctagtgaaaaaacttgggagacaaggttggggagaggtgttcccagtgggctgctggatttcccctactggtctagggggtgaatgaagggatggctcaggaggtccctggagtattaactgctgggccctggtctgtggatcgctgtgaatgccaaagatctccaggtgggctctgaactaatccaataatgcaaatcctctgtccttttaggagagtgattggcatggccaaataatttttacctgttaccaagcctacttctcagcaacctataaaacgcaggctgtggagccaaactgtctgagttcaaaacccgatattactacttgtcacccatgagtgacttcgggcaagccgttcagtctctctgttccacctttgtaaaatgaagacaatccttatacctatttatggcatcatgaagattccagatgcctgcagagagcttaatatagggacaggcatgcgttagcattcaataaaggtcaactcttgtaattaagtgaggtgtagaaatttactaaacatcgatactcacaaatggaattcatgtgttgctggagtttactgaagactttaatttggcattctagcacaaaagtctgcatgccaagcaattgggcggtactgccacacccccaccacacctgagcccagctgagagtttgagttagtgactggggatgtgcgtggttaccagcgagagcattggcagtgttgtcttgagttgctgctgctttccagctgccacctttcttgctttgtaatgataaattaccattagtttagtttcatcattacccatttagtttgttgtgggttgtttgcttaacaacagtaatttgggcttatgatttttcaatggctgggttttaaggcatgtatgcattgcacttcaacgatgcatcatctatctcccttcctaaggcaaatctttctctagtctttccccaaaatcgtctgcctgtaacactttcatgttatctctgagttcttttttttgctaaaatactgggacagatgagcaggaggctgtgagtgattttactctggtgaagcgggctgtggtcaaagaggatgggagacactgttctagatcagtctcccctctccctcccgttttattgatgggaaaactgaggctccgagaagtaaaggatcagagttcatacacggtcgctaaaatctagtcctcctagttacctggcctgggcttcttccacgccacatgacctgcctaggccagttccctttctcaatggaggactttgggtcctaacgaaagtgccttgaaattgcccactcttgggttagagtttcctcctggatcttccaatatggggctggtttgaagtagatttatgtagtgcataagagttgtggctctatagtcagactactatattgaactgtgtgacttggatgagttacttaatcttcttgtgcctcaatttccccagctataaaatgaggataatgatagcaccgacctcctatatctgggaaaatttggtaagacagttcacatagcatgcacaatgcctggcacatagaaaatgctcagtgaaaggctgggtgcagtgactcatgcctgtaatcccagcactttgggagactaaggtgggaggatcgcgtgagctcagaagtttgagaccagcctgggcaacatggcgaaacttcgtctctgcaaaaaataaacaaattagccaggcatggtggtgcacacctgtaatcccagccagttgggaggctaaggtgggaggattgcttgagcctaggaggtggaggctgcagtgagccaagatcgcaccactgctctccagcctgggtgacagagagagaccctgttaaaaaaaaaaaagaaaagaaaagaaaagaaaagaaaatgctcagtgaataatgattattgttaatatttttaggttccagagctgatgtcccactcccacctggaacctctcagggcattattatgcccatttaatagataagaaaatggagtctcagagttgtagaaactctgaactcaagacttgtgggcatacaggcagagtccttctattcccaacaccaccttcagggctaacctcagtgtctctgtgcttacgttctgccttgacagtctcttcctcttcattggtgctccactgtgtagtggggcagtccaaagcagctttttacacatttctaggctacttggagatcattctgtctttgttctgcatgggcagagcctctctcccattccattgcaagtggcttggcagcagagactgctatttctttaaaacacatctgagagaggtgggacagagcaggaatgcccctctgataggttccacctgcctggttgatgggaagatggctgggatggggtttggatggggaggcactgacaggttccaaacagactgcaagcttctctgtggcctgtggagtgctgttcatggcggggggagaggccctgggacaattcatgccctggtcctccacctcagctcttgcacctctgagttgttcagcaagtgtgcttagggtggacaactggggcaaagacagaaaacaccttcctttgaaactgaagctagtaaattcaacataaaggaggtgagattaagccatcagcagcagagacctgaaacagcttggagctgggctgttgcagcattgaaggggtttcctaaatctcaacacaagcttagaatacaatcaccattagagaagtagcagcatctattgttataatagaagataaaggcctgctccagggtgaaagaatcaggaattggctgtctcctgtgctgagaaagggtgggggagatggctaacatgcataccttagtctttcctgctggagtgagtaagaggactaaggtttatagagcacctactgtatgccaggcagtgtgctaaggatcttgtcttcctttatatgctccagccacactaaccttcttttcctctcaaacctaatttgttcccactacagagcctttgcacgtgctgctcttcctgcttcttctccctgccctttgcatgcatgtctgcttaatactattcaagctttagctcaaagtttgtcttctctgaaaggccttctccaaccctagttaaagccatatctccaccttgtcccaccatcacactcttccacatcactgtattttatcttctttaatgcacttatccattctcaaatattttatttatttccttgcttattttctgcttcccaccaatataatgtaagctctttgagggctgggattctttcagctttgttcacaaaaatatacttgaagtctagaacagtgcctggcacatagtatgtgttcaacaaatatcttttaccatctgatggctggggtctttccccacggcattttatgcaaacctcactaggatcccaggaggtggtataatggtttcattctgcacacaggatcagggagcatgagggactttctcagtgaataagtaataaagccagaattcctaggtttttttttttttttttttttttttttttgcttcaaaactgtgcttttaagtacaccacactgcttcaccaggggagagacagggacctgagatcagcataaggtaaagacactagccgttctcataaccaagatcccttcagcttccatcaagcaaccatctggtcttaggctggctttctaaggacatcttgctgaaagaagaaggtgctgaccacctgacgtgactctttcatgttgcctagcagtcatctcttccaaggaaagctaatcactgggcattctatttatcctccagtcttttgtgagagcttggttaatatgagcctccaccccatgcctgccccttggaggctgtaactcctggggatacagatacaatgagctcctgattaggcacaactgagaagcaaatcctgcggccaccctgtgaaggtgaataagggatgctcagatgacacttgtttcagcgttttgggccaaaaagcatcgccacataaatctcctcgcacggaacatctgccccaccccagaaaggtggcccatttctttcaagtgatatcagacagggcaaaattcctaaacaagcaacaaatatggatgttgtctggaagtcagctgttgaaatggcttgcctgggttcatgctcctcacagccccctcctgtctacaactgaatccctggcttcaccccactcccagctgtaggctgagccctgatccccactctggaatgtgtctgccctcctccagccacttctcctcagggccagctcagacctgatgctccagctctagttattgggtaaactgtctcacactcggacttggctcactattgaatgtcaattccagtgactgggaatgcatttcacaaattaattgctatttttgtgggtgtctaaaggtgagtggagtaggtagggggccgtggctcctgtttctcttccttcctggtagcagctcccctggagggcagcttctgtaggtcactctgtggttcatctgaagacacaacctgaagcacactccttcgtcttttctggcaattttgtaagcattcaatttccttttatgaatcccttttatacctaaagtgatcatggctgtttctctttcctgcactgaactctgactgagagtctactggcctgttcttgggctaagcttttgggacaaagaagcaagtcagacacagtcctgtccccagggtgctcattctggtggggtgggagtagggggtggtctgagaacttgaaggggaccactggatagacttggtgggggaaagccccaactctgcagatcatggagagggaatctgagtgttagaaagggctctcctaggccgtctccaagacaaggagcagttttcaaggcaaagaaacagcagcatgaccttctaggtggagaggaatcatataagttctcctgttagcttctgtcctagaggtggcctcacttcctgcagagtgactctctgacctgcctctctgtgggcctggagtgccccgcactgacatctcagcatctgcaccagcccctgcctgcactctgagacccttctatgctacctctgcttgcctctcatgaggctgaccccttacccaatgtcatctacccacctcctgccactgctgatgggggaggggaagggacctgaccttcattaggcactcgtgtgtgccaggcatacgatgccaagtgatttccagacacgctgtcacattcactcatccattcaacaagtgttcgttgtacatttattagatcctgggtactattctagctctaggagatacaggattgaataaaacagatgtaagaatgtggatctcacatcctagcgaggtagacaaccaacaaggaaacaagtccaatatgacatgtaatatatccgatgatgttaagtgctgtggggaaaagtaccaagacaaggatggggaccaggaaatggcaggacctgttgcagtgttcagtaggtggttggggaggtctcactgagaagccggcatttgagtaaagatctaaagggggtgaaggagcatctgttcaaacatttttgaggaaagcccaggtagaggtgggaggatccttgagtcttcactgcagggacaactactgcggatgacctcaattcataggcgggaaaatgagagctctgagaggctgagcatcttgctcaatgtcccacaattatgatcccaaagcacacatgtcctgccataaagcccatgctgacacactttgctgcttcgcctggtcctgggttccaaattcctggcaagtcttcttgccctacctggggctggcccaggcctgtccaagccccaagggtgcgtctggtcaatggatcccctcccttctcttcctggcctgccccatgctctgtgctgacagctgatacagagctcacctcacctttggcagaatgacagtttctatatttaggcgactcatgaatctttctgggattctgatgaattgctgttttcctgagctctggctggagttgctcttccctgtgattcaaacattaatgctccccaaggtctttcctgcaggagttattgctggcgggtaattggatgcagagtttcctccagccactgacccaattcctcttggctcaaacctcaggcaggaatggaggcggcattggaggggtagagagctcaccaggctctctggaaacagctgtcccaaaagcacatgcacgcacacacacacacacacacacacacacttatacacacatggttatgcacgcatgcaaacacgactgttgcaggggcttgctcaaggcttgcttgccagcagctatgtcctgtaattgagccctttggaatcataacccacttgtcaagaattccttggagtcaggccctgtcctggaactgcccgtgggtgatcttccaaggcaaaggacttcagaatgccccttgccttgcccatgtctaaatttccctagtatcccattatcattaggagctggtcacttggccataccttctctctgacacactcctaacctccaacatgacaatctgggccccactctctctctttggccagctctctccacccttccttttgattcacgtgcctcccttcctctctgcttagcgtgtacatcttggttcttcttgctatttctatcatcttcaatgtattaaaagctgtttgaggtgtaaggacaacagagactaagtaaatccctagcatagaacctggacactggctcaggaggccccacatggccctgggatcctattctggaccccgagtttctggatgggcaccccctgtgccaggaggtctgtgccagatgtttgtctaccaatcctggtcatgtctggcccaagagctgggctttcccctttgtggactcaggcatctaggtaggagcagggaggggctaatagtcatgctgtgccatgctgagatttgcagaatattgaactttatgggagactctgacttggtatagtctaagtgcctcaatgcttataagagaaaaccaaggcctgagctgggtagtcacagaatggctcagtcttgggtcgggttttctaagcactgggctgtcttctaagggtgtgtgtgtgtgtgcgtgcatgcgtgtgtgtgtgtgtatgcatatatttgtgaatatacaggctgtagttgtttcaaagatttgttgagagggggtttgttaaggataggggaatctgattattctctaaatgggctcagcccacaaataagccaaaaaagcctttatttctgggttcttggattcctgatgtcactctgaccaagcactttctcactcatttaagaagcccagttccagagatagtaacaaggacatagctaatttggttcccctgctaacatcttcagctaccttttgaggagaggaacaaggaaaaaggtaaatggtaatggaggatttgccttttaatgtaaggacttactgaggcattccctgtagactaattttagacttcactttcacttattcattcattcaaccaatcattcactcagtaattatttattggagaccaattgacatattccaagcagtgtgtggaggcatgggagggtaaaagatatacattaaagaataaaagacttacaccacaatttggtgagcaccttctgtctcaatgtagtggacactgtaatatccagagacattacgcatgtatggacactgcactcattccaacctggactgaattccaggctgtgagaccttgtgctataatttataaagtacttctgtcaggcacttgtctaagtactttcctgaatttacacaattgctctaatcttttatttcttcatctggggaatggagatgagaattccttcctcactggtggttgtaaggattaaataggtaaattaatggttataaagttaccaacatattgcttgacccataataggtgcttattaaatgttacttcctttgctgtcttctctgctgtcaaaaagctcattgttggggggagaaaaagtctatgaacagagacaataagcataaagttgacagccaagttccaaaggacagttgggaccaagtactggcagggaaagtgtccagggcagtgaggagttcccattatctgggaaaattaagaaatgtttggtcccaccttgtttctggagtccctgaactctgccccctccctaactgcaggtgttattgaggtcctagcatgcctcataccacaggacccctgggtgaaggcaagactccctcccctagggcctcaaataaggccctcccctcctggcctcatccttgcagtgactggaaggaggtgggttgcagggaagtacagtgagagtccagaccacaggcagagcccagaacctgggcaaacagaatcccgctcccactgcactgcaggaaccgaacggtattgcataaaggctggctttgccgaatgcatctcgacaactcatcagagaatgtcaaattcagctaaagctttagcaagacaatgatttgtttgtttccactgaagagctcaaaaaagaggcaggattttaacttgttccaaagaaaagagcatcatttggtaacagactggaatcatagaatcacagaatcacaatatcttatgactggaagagccagcaatgtctgtctcattgacagattgtaacaattatgtgagtcagtgtacataaagtgccccctacagagcttggcacacagtaggtacacactgactgatcatatgttccaaaccccatgttttaaagatgaagccccagaccaacacatgacactcaacatgtcccaagccacctttgccctctgcacttccaccatcaccagcccctggtcccatcaaatagcactgcttcctcctacttgccacttctcttggtggcaccaccctcccaagttgtgagccagccatgaccaaagcccctgaggcagttgggactcctctcttgacctctgttcagtcacttgctaagtcacagaggtcctgcccctacagtgacttccagttctgcttctagcttcttagtactgccaccgtcacactagttgagttccttgtcatttctcacctggatcattgtcgcagcctttgaattgtttctgccctgcccccactaccccccacccggttcccttctccagtttttgtgtctcttctctccaaataatgttacctgtgatgctaaatatatttttccaaagggagctctgctgctacccctctatttaaaaatctttaatggctccccactgcctactgtattaagcacaaactcctcattctggcattcaaggtcttaacccaatagtgcgacaggctgactctatgagccatgctcagcaaaactagatgatctgctatttcccaaacatggactatctaccccatttgacaatcccaatcccaagacgtgccttcctctgcctctatttgcttaaggccaacccatcctttggggcctttcaaataccatttcctataggaagtcatccttcccatttctaaccagatgctattgtctgaatgttccctccaaagctcctgttgaaatttaattgcctttggaacaatattaagatgtggagcatttaagaggtaattacactatgagggctctgccctcattaaatgcaataatgccaatattgcagaattgggttaagttattcagggagtgggctctggataaaatgatgaagcttgtcctactttctttctctgtctcacatgcccacttccaccttctgcccttcaccatgggcacctacacttcccagatgctggtgccatgatcttggacttaccagcctcagaactgggagcgaaataaactttagttctttataaattatgcagtctgtggcattctggtaagacagaaaattggtgccaaagagtggcactgttgctataacaaatacatgaaaatatggacgtggctttggaactgagtaatgggtagaggctgaaataatttggaaaagcaggcagaaaaagcctgtattgctataaaaggagcagtaaggaagattctggtgaggccccagaagagaggagctgtagggaaagtttggaactcttagaaattacttaaatggtcatgataagaatgctggtagaaatatggatgataaaaggcattatgatgagatctcagacaaaaatgaggaacaaggtactggaaactggaggaaagaccaatcttgttatacagttgcaaagaacttggtggaattgtacttgtgtcctaggactttgtggaaggcagaacttaagggcaatgaattaggctatctggcagaagaaatatctaagcagcaaagcattcaggctgctgtgtggctacttttaaccacaaatagtaagacaaaataggaaagaaattattaatacttaaagacaaaatttacaaataaaaggaaagcaaagtgaaaagatttgaaaaactctcagtctggtcatataaagaacaaaaaagcatttttaggagagcaaaccaaaggagtggccaagcaacagtttgctaaagagactaatactgatagaaaaaagataggtgctattcatcaagacaatgggaaaaagaccccaaaggcatttcagaaatcttcaaggatgcctgtcccatcacaggcccagagctctaggagagcagaatggtttcaggggatgggccaggggcgctgtccatgggttcactgcccagagctgccttgggaacctgcaccccacattctagcacagcatttttctgctgccccagctatggctcaagtgggcccaggtgtggcttgacctgctggacggtagaagcaataagccttggtagtgtccatacggtgtgaattctataggaacaaagaatataagagctgtggaggcatggcttcctccacctagatttcctgccccactcaggggagtggttcaacctctgctgtgtctctttccttccaactgctctcccattgtccatggtgcttagacagcatttgaacaaaacaataaaatggggaaaggcactacctcactcagagattcgctgtgaaaattcatttagatgagactggtaaaccactcggctcagtgccttacagacagcaagccttcactaaaagttagcaattttggttacaaatgagaaaacagaagctcagaaaggctgtacaatgtacccaaataaaacagctagtaaacaaaggaatttggctttgaactcaagtctatttgctttcaaatctctccttttctcaaaatgccacccagaggtacattgaagatccctagcgtctcttgcagtgtttgagctcatggaggtgactctatgaagctccagagtcaatgaaacccctgctgagtctcacatccttctctgccatatatagcagagggggtttctggagaagacgtctatgaatgtgcctctcacccaccttctggtctcagtacattcctagccctcacggctacctctggtagctccaattctcctccagattccactgtaataacacctttaggaatgatattctttgtagccttgggtgggcctctcgggtgatgcccttttgtactttaaagtgctgtggccccccaagatgagtccatttatatcagagccaactgtgtccttgctaggaaggcagcagaggagagagagctttctggaagctaatgatgtggaaccaactgccctggaaacacgcacagtcattatgtgggaatgtgggagtccttccaagggaatcaagtgtagccaagccatccttttggtaaatttttctcaagttttactcacctgaaaattattttcacggaaatgtctggcagggcaagttaaacatgttgcagggagattcatgatctaagtggcaggaccctgattcacaaagactcaacactgagaagtttagatataagaaaatcatcagtgattacttatattacaaaaagattcacctctaaattcccttcaaataggaaatgatctcccattgttgtttttaaaacagatcattaactatttgactaggagatgtgagagtgggaggtcagacaaagataaaggcacaagtaggaaaaaaatctaccactgatggtgctttaggagagctctggaaaaatatccaggagaggaagggatttcatccttatggccctgtatctgcagcattgcccgtccctttcatgtaggcttcactgagacatttgcccagatgtttgtgcagctctctcacgtaaataccaagaagccctgtgcttcccagacttcaaaaacaaaaggaagggcaagaagggctagaaacccagcaggacagagcatgagaacttctttcatcaagggcttcaaagatcttacaggtcataaaagactaaagaccaggttgcccaagccctcatcagacacatttctacaacattctacaatattcccatcaaatattcactctacttttgctggagatcaggagctctctacttcctatagcaacatacttcagtttgcacagccctgatcaattggaatttgttcttgttgaacccaacatatggcacccctttcacttgacttagatctgccctcttcccctctacaggccttcagatgtgtgatgttgtgggcctcaacaaaggtaaactgatgtgaaggctggaattggctcctcagcctccaacatctgcatgttcaagaagatatcaaacccctcaatggactggtgatttgatgcatcacctctgtgagttggaggggtagcaagatggtaccgggaattagaagacctgagttctcaatcttactctgcccctagctttctctaacagccagtacatattaatattttcttctacccaggaaattttatcaaagccattggtttcagttgactagcaaattcctatccctagcccaaacttctcagaattctagacttgtaaatcccattgcttacttaatatgttttagtagtctcagaggctcctcaaactcaacatgtccacacttggtcttctggggaccaatcctacagaatggagccatcacacatccagttgcacaagtgttgtctttcaaccttctctgtcaacactcccccatccaacacattaccaagtcccattgatttcacctcaatatagctcaattccacctgcttttctccatcaccattgttatcatgtctgttatccattactcaactcaggcaccagcctcctgacaggtctccctgcagctcctctggcctacctccaatgtgttctccaaatcagagtggttccttcaaaacacaaatctgatcaagtgctcaagggctttccattgtcctcagactagaaatagaatcctttaacctggggtcataaccctgcaacatggcctgtgtttgtttttagccatctccaacctcatctcactctgggctctattcccttgggcccccttttagtaacttgtgcttgctccactccctctcaccacaaggcctttgcaaaccttgttccgtctgcctggaaagcccttctctgccctgctagcccagttaaattctcatccttcaaatttcagcttcctggccaatttctctcctcacacactttcatattactgtggccctctcccttttcacactggtcagaactgcgatgcttattttcactcttgtctaattatttgattaatgtctgtgtcctccaccaagtttgaaactgaatgataggaaggagcagtgaatctgtttttgctcatgattgcatcatgccccctgatagtatagtacttgctgcatgaaacttttccaataactagtagtggattggatgagtaatgtatcctatactcccaaatgatcatgtcctaaagttcagcttgtgaaggtaaagcctgcatttaaaattcaggcttctgggggcaatgggtgagtgggtgcaatattttccacgtatggagtggcctagggagccatgaaaatccacagtccccacccctgccacaggtagcagatggctatgccaaaattaaagcccagttctgccttggcagatgggcagctcacaaaacatggtgggaatggcagtggtgttcgctctgcaaatatcctaggtgtagggtgcaggccttagccccacatgcctgtccttaccccctaggagacaagaacaagcacaaacacagcacaggccctctggacagccaccttgccactagcagagaggctagttacccatcaagagggaagtctgtgggagcaatattttctcccatgcacggaacttcagagttcacgagaacttctcagccatgagctcttacagttcagagaactcagtagtatgatggaatgcagtggttctcaaagtgtggcccccagactggtagcctcagcatcacctgggaactaggtaaagatgaggattctcagggcttactctggtcctcctgaatcagaaactgtgaggttgggtcgtttcaacaagccttccagctgtcacttcacttcatgcaaaagtttgagatctatggatgtagtggaaggaatgtcagctttggagagaggcaaaccagagctagaatcctggctgctcctgtgcctggctgtgggcccatgatcccattccttaatcagtttggtcacagttttcttatctgccagaggggacattactcattactcccttccccatggagatactctgagactcagcatggaagatgtctggcatacagtacgtgctccatatatttcattttccttccttctttctacaaccccatactgctctatagaagatgaggcagactcccgagtctgatcgtatagagagtgagggggatccaggtttggggcacatccatctgactccttattcctttttccttagaccacccctgagagggagatagtcagaagcaggctatctggggtggcagcctgaatgtgtatggaacagcacagcctgactgacttgaggcagcagaaaacatggccaccacagaccccaggtacctcggtaccaagcttgcggggcctgatcctccacactgctgaagaggctgaaggcgcaaacagaaagtgagaccttggggatcggtgaaggcaggaggagctgagtgggagactggaggatgcatttgtcctggcccccttcctgcctcctggagggtgaataaagaaagtgccacccatggctgaaagttcataaggaaaacagaatgctctgaagcagtgagtgtgacttgtttgtagaagagacagccagtctgatggttagaagcaccggctttgaccagacaggtctgggttctaagccatttaacagctgtgagatcttgggtaagtgtcttaagctccttaagcataagttttctcattggtaaaaggcagaagaaacagtaccttcctcatgggactgccatgagaatcacattagcaaacttggatgaagctacaggcactgtgcctaacacaaagtaaggacacaatcgaagtgattccctttccccaacctcagcctctgttggctaattcctgtgttccaggcaatcagatgagagtagcctttgaagtgttgagctgctccattaacctggtgccatagaggccccacaagtgcctctgctgcctcagaggtctgctctgaagccaagtacatttgcttctggtagtccagaaagccttgaagacaaccaggtgaaagaatagaggcagacttccctggaaccactcatttaggaaagttcaaccagttctgaaaatcaaatccatggggccaggcacggtggttcacgcctgtaatcccagcactttgcgaggccaaggcgagtggattacttgaggtcaggagtttgagactagcttgaccaacatggtaaaaccctgtctctactaaaaatacaaaattagccaggtgtggtggtgcgtgcctgtaatcccagctactcaggaggctgaagtgggagaatcgcttgaacctgggtggtggaggttgcagtgagctgagatcacacccctgcactccagcctgggtgatgcagcaagactccatcaaaaaaaaaaaaaaaaagattccgtgtatccatccattcattcattcatcaaaaattcaccatcacttactctgtgagagatgctgtgtacatgctagagataccaattaataagacttggttttggcctttgcggagctcacatgcacatcttagtgggggcgcgatgggcttgcaaaccacagatctgctcctcctcccaggcatacagcaggatggcactgccctgcagtgtgacttctggccataagtgacttgctctgcccaatgaaaggaagaggcatgtgtccctgcatggaggacactttcagagcccgtgtcctggtgactatggaagctcatatggagatggagcctgggtccctgagtcacctgctgttgatctacataggacatgtaacgtgagcaagaaatgagcttgtgttgtattaagccactgagatttggaggttgtttcttctcatggcataagtcagtccgttgtgactgatccagccaccagctaccctactggccctggtgtctctgtccttgtggatggaccctcctctctccctgccccctactcctgccaaaagtggagctttctttatcaaaatttaaaaccctgagcaattaagatgctataaattgaaaagttctttccgacgaataaaattgttcttatttctaatgaatacgagatggcttacatgaagctaagcactctggtgattataaaatagctgacataaaatatcaacatttcttcttccactgctaatgtgacctattaaattagtactgattaggcatttttcttttgcaaaacttctttctccgacattgattctttgcacagttttcaaccccaagtttgatctggcctgagatgcttttctccttcttatctctttagggcgcattctgggcacttcttccaagtagctgtttccaaaaagcaaatcccgtgggtagcttgtgtctcccaatgtccaaagatagttctgagtttacatcactttatttttaaaagctcttcattcccatttattgttattttattgttttttttttcctgtgtaggactagagagaaaaaaaggattcacaaataagaaaaataccctactttttttttccaaccagaatgtgtagtattgcggcgcttgtggcagattgaaatgacttaatgtagttcccacatttacagcgatgaacctctctactattaaagaggcaacatttctcagtttgtaaaagctttctcattcattcatcaagtccagcggctgctgcctcccctgtctgtgcaatccgctcactcctctccctccttgcttctcccccctccactcagaccttcccatctcttccccgggaggctccacttggctcctgaccaatctcggcgctctcttcttgcttttccagtgtattctccaccttgcggccaagatcaacctttctaaaatataaatctgaatttgccatgcctctgtttgacatccctccccactgttctctgtgaaaagcctaatctggacatccctctacagtccagtgcctgcttttgtctctgtgccttgtgctgtacacccagcaagcaatgatccccacaaagatgccatattcttatcccctggcctctctgcacaggctgtttccccttactggaatgtccttcatttccccttctctagtgaacatttcttcatccttcagagccccactcctccttggagaatctccactctctaacccttcagggctgggcagacagcatcctgtgggcttccctacagtgctgtaacactgtccaagctgccttgaaatctattgcttgtctgtctcccgcattggactgcaagctttttgaaggccaggagtgtatgtcatttcccttgatacctccagagcctggcacatcgtaggggcttaaagaattgttttttcttttttgagatagggtctcacctgctttgttgaccaggctggagtacagtggcacaatcatggctcactgcagccttgacctcctgggctcaagtaattctcccatctcagcctcttgagtagctgggaggcatacaccaccatgcccagctaagttttaaacattttttgtagagatggggtctcaccacgttgcccaggctggggtcttgaatttctgggctcaagtgattcttcctgccttggcctcccaaagtgcagggattacaggcatgagccacaatgcctggcctaataattgttgaatatgagggactaaaaccattctttcatttgattttgatgacaattcagggaagtatgcagaggaagaattatccctaatttcacaggtgaggaaactgaggctcagggacacacagcccaaactatctttcaaagacctaatgctgtccccagaaccctgggtctggatgtctcatccctgagcactgtagaatggccaccaagggaagggtgagcatgtgcctcagccaggctcttccagaaggtacaggggcagggagaagagaagatagtagatggatttgcagcaagacctgcacccgtgtatctgacctggtcaatgctgaatttggatggctttgttccatatccaaggcatgggtggctggggacaacttgtgtccataagtggaataagatttccagtgataatcaccttgtttttccctgcaattcctctagagtaataatggggctaattcaggggtggggaagctcttcaatggctgcccaagtcttgggggaagggaagtccccaatccttgcagagggatcccctgtgttccactggcctctgatctgcttaatgaatccaactcattgaaaaccaaggaagagtttatgttgcatgttagagctgatggtcctccaggagcccgagatccaccattaaagaggagctcctatattactgagtaaagatagcagttacaatgagcaaaggaaacaagaaagaagaagtatgatgctgagaatcatggacttggccttggacaaaggaaggcagaaaaatggtcttagagaggagggcttgccatcagataaaggggacaccaaacacaagtcacaattggtggacaaagctgggagaggaaagggtgagctggaggtgggtgccccagcttcattcaggaagaggaagtcgggatatatgacccacattctgcttctggctcgctaggatgcagctgacacccatcagctgacagcccggtatgagatgagcacaaggagactgtctgctcacgtgcttatttctgaaccctcaaacccctcagtcttagggggtggaggctgctcctggaggaatcaatgcctgggaatctggtaacggtggagacccagtccagggcctagaatcattctcttacttgcttgctgaaataacatgtcttgaacacctactgtgggccaggtgttgtgccagtcagagccctagtctcaaagggggctggtctagtcgtctggagaccagtctagttcctgaccttactctggtcatggtctctgtgagacctgatcaaaactgagggccttttctccaggaaaaaaataacctagtgtgcgtgcacatacatacacacaaacacacatgcttgtgttctgtgtacaattcaagggggttcctagcttcccctgaaggttatccatggaccctgggttaagaatccctaggttaccattagttgcattgtattatattcctgataattgctaagagaatagattttaggtgttctcaccataaaaaagtttgcaaggtaatgcatatgttcattagcttgatttagccactccatgatgtgtatataattcaaaacaacatattgtacataataaatatatataacttgtatctgtcaattaaaaattttaaaatatgactgtcatacaaaaaaaaatccctggtttagatagagagacagacatgtaaacaactgtgtggtatgaaatgtggagctgtgaaatttggagtgaagtcatgctctttagggataatgtaaagtcttggcttgttattcagtcaacaaatatttatttagcacctgctatttgtcatgcacagtgctaggcaccagggacaaaatcataaataaaaccataaagtccctatgctttggatcttatagtccagttgacagggatggtggcatttgaactgagtcttgaggtcaggaaagaagatgggggtgggcacccaggcagagaaaacagtgtgcagtgggcgtgctatctgagttctaggtgcatgagctgataggcgtcatctctacactgcgtccctccaccaacctagaggatcagtttccaatgttcctttttgaagaggacagcccaacagaggagggccccatgcaggcaggggaagctctgtgtgtgcactcatacataagtatgaatgagctggcttactgccaaataggatcctgcatccccgacagcctccctgtagcagtgcccagagccatcaccagggttggcacagccaaagcactgctgaagtttcctccctcattgcagcccagaactcatcagagggagagctgtctttcctcacactggccagaattccaagtgcatgagaaatggaagctcactggtggctcggatactgaaggttctctggggcccaaggcaacctggcacaaatttggtgcctttacgcacagccattaatggggattggtggaggagagcatgcatgtagctttgaactcagcttcctcttctttaggctcaaacactatgtagcccacctggaagacttcactccattttaatggaaggaaaccagctccttccatccttccagtttcttggcatacttaataccccctgtgagatttctggcagatttgtggctggcagttagaggacgttttgcaactaccacaaaataactgttaaattaaaataaataaataaaaagagatccagaaaaagcatgcagacacgtctggctttgtaaaattactgtcagtcagccggcatatggattcctgaaaagttgggcagaaatcacaatgttgtcaaaaggatccctgaaacagatcccactttacctggcaggcttttgttcatcctcagaacctgttaaaatgtcccctgctttatataaagccgttttgggactctttctagtataaaggaacagacttttattgcatctctaccatgtgctagagactgggctatatcctacattatctcaaaccaccctccttacaaccccacaggtaggtattagtgccattttacagatgaagagtctgagattacaaagttaagagacttgtaccaggttctgcagctcacaggtgatgaggccagaagttgaatggagctcttacaaatggctgcagagttagctcctctgctcaaatggccctttcgttctaacgtatcattgtgggtcacaccaatttgtaatcgtttgttgacaggctcttcccttccatttggtggtcctccttgatgcaggggtgcagaaatgtttgtggaatgaaagtagaaatagattacagattccgtcagatacatttcatttgcagtttcaatctatctgtaattccttcttagattctttgattgtctcttagggctctctacataaacagcagagccattcccactttaagaaacctaacctcccctcaaatcatccaaggataaaaacaactggaaaggaatggccaggaaactattgaaacatttactataggatcttgacctacactcttaactcattgaaaacaggacttggccaacaatggttctatttacgtccaccttttagaaatgtacctgttcaaactagaaatccctgagcattccagttgcattcagttaaaggaggtaatttgttagctatgttgttagtgaccagaactatcccaggcctcacaatgaggggaaggagcatggtctgaattagggtaaccagacagtgcctttaggaggcatcatggaagcaggaggagcgccttgtacttctgctgcttctgtcccctcagctgggtccctctgttcctagcatgctttgaagccagccccacatggaggagcatctgacgtcccttgctggtgaggtgggtggagggaatagcttcactgaactccctccttactctacattccaccaccaccatcatcaccacctttccaccatcccccaactgctgggagtccaggaatcaccaccaggccttggcagggacttggggatgctgacttactgaaaaaatttctactgggaacctgggctgtgagaactgtcatctatttggggaccctctgacatctagagatcgtgcttcctgatgcttcctattgaccagactcctaactcctgatgacattaaggtacatcccccatatccggagcctgtgtgtttggagttctgtggcatgttcagctcagacctatgtttcactggaaaggtggtggccctaccaagcaagtctggttggttcaatgctctgctccttctggtctctgtggcaggcagaagggccacgcggctgtgctctgcttcacattttgatcatctccttcggcaattcagagaacctttggggagtttcggttggctgaggaaaaataaaaacctctttgttgaaaagcacttggccagttcataggatactaggagctggaagagacttggtgaccgagattaccatccaccaggggtcatgtctagtcaaaatgtcaggcagctgggcaggacctggagccataatattagagttctgagttcaaccctccacttagcagctgtgagctcttggaggagtcctttaccctctcagcactttgttttgttgtgtgtaaaataaggataaaactaatagcaaacacttatagaaaaacacaaaagtgtttataataataaacacttttaataacacttttattaaacacaataaaactctttatacagacaaaatcattaaatcctttcagcaaccctagtaataaattatggcaaatgtggtggcttagaacaacagaagtttattctgtcacagttcttgagcacagaagtcagaaattggggtgtcagcagggccccactcctgagggatctagggagagtccatctttacctcttctgacttctggtggcccctgacattctttggcttgtggcagtgtgactctgatctttgcttctgtggccttctgccttgcatctcaaatctccctttcctttctcttagggacaccagtcattggacctgggcatcaccctcaatccaggatgatctcatgctgagatcctgaactcaattccagcggtatgttccgtttgcacttagttccaaataaggccctattcacacacaggtaccaggggcaaggacttggagatatcttttggggggcacccaatttgaatcccaagaaacaaacgaacaaaaaccacacccccagcctgcttgacgaagggcaaggaggtcagtgtgcttgaagcagagtgagggagtgtgtggcaggagctggagtcagaaggtaatagtggccagggccagatcgtgtagaaccctgcagtgactttgatgtttaattcaagtgagatgggaaagggatatgggactttgagtgcagattgacaggatctgctttgttttaaaaaggctgcagtgtgacaagtaggttgagaactattgtgggttgaaggcataaacagggagacagtctgaaggttattgcaataatctagggatgatacggtgacagcctggagcagggaggcaggggtggaggagaagtggtcagtgaacatttggaaggaacagccaataggatttgctgacaagttggatatggactttgtaaaaaacaagaatcagggacgatgtcaaaatttttgacctgagcacctggaaagctggggttgctactgactcttacttacctcccagggttcttataaagaaccagtaagataataaatggaaagcttgtatgaaccccaaaggtctaccaaaatgctatttgttgttgttatcattattattgttttgtgatctgaaactttccagctctaggttgccagaagatgtcagactgggttgaaccaccatcaagaaaatcagtgtctcaattacaggagaatataattagttcattgtaattttgatttgttcttttttagtaccttgctctcttccctgcctgtgttgagtacatatttgagattcaagaagcctctctctctatcataatggacaaggcaacaccaatatagacagcaacggagaaaacagtggcaattttgaaattatctccttgagatccttgtcattgtatttttcagagccattgtatttaaatggggcagttgcaggctcttcactctgcacagtgtgagttaggtacacaatggtagactgctgttcctaaagaagtaaattcgttcccgcccaaactcgcccaggtttccaacaaaatccttatcactgtgacagttgcctgttgatttttcttaaaaaaagagaataatgttccatattggattcatgagtgcactggtgaattttcattacttctttggttcatttattcaaacagtgcacagctttcattaacaggaggtcgctattgttttcatcttccccattttacaggtaaagaaaatgaggtttggagaggtgaaactgatgtgttcaaggccacacagccactaagaagcaaagctaagatttgaagcccatctgccccactcctaagtgtaatccctcatactcgaaagtaagttctaaaagtattggtctcacagaaactaacctttatttttgccaaaacagtttttattaacttcagtgaggagctggaatcatagagtgactttgatgaaacagttttattactttcaaatgttatataaattaccaactaagatataaaagagtgcaaataatgaatatgaggggagttaatgaaaaaattacaatacataataagcctgcagaatgcaagcgtgtatcataaacataaaagacctttaacattacagtaattaattgctggactcagaagttgctgatgcatgaaaagaatgcttaatttgagagccctaaagtttagaaaaaggatactggttttaaaaggatttaccttactcgctgagactcaaagttctcagtagcagaggttatttcaaactgtttactcaaaaaacacagacactgtatctgcttttctatcaaaatctgggtgagcagaacccaaattaaaaagcacttattgtattcatgatgcatttattgtatctttcatcagcagttttcaactaagcagaaatggatcaccatccacaccctcttggtctattttcctgtggtttatatgagatttcaagatctgcattccaactgtatatgctcaatcatactttgcaccataataattggttagcggtagaagtcagcctctggttttgagtcaagacatgccacagagtcctggctctgttacctcctagctgtgcaaatctgggcacatcccttaacgtctctgggcttcggtttcctcttcagacaaattaagataacaaaaatacttatatcacaggactattttgaggatttgggcattgtatacgaaatgtctattatagcaactggtacattaaatagtactgagttaatggaggctattactacaattgagctacacaacccaacccctttactttagagaagaggaactaatgtttcaggaggttaaagcgacttgcccaaattcacctggctatttagggactcagatggtatagtataaaagcagaatgaaggtgtccagcctgcaagctcaatacctcatcaaccattatgttaacactgaagaacatctcttcctacatagccgctataaaaactcaccatctggaacatatcagtcaagaaaggcactgcctgtgagaggacatgctgaaatggacaaagtcatgaatgcctggagttccctgaaaacaccgccacctgagacttagggagggaaggacccagcccccagccttatgcatttaaaacggaactttctccatgacatgtggtcagctcccaaatgtaccagactctgggtcctctgtgtccttcatgataaactttgcaaatgtgactactgaacctgctggggatcatctggtcagagcagtgccacgttgcctgctttgacctggtttcatctgaagcctgaaacttctctagaggtccagcccctcaactccacttccatcctttgctgccctatttacacatctccctgcatcccgttggatacctgcctttcaggggtaagcacctaccaatccaaagtaagtggcctggaaacctgtggcctcactgggtttgctccaattcaacagtaaatttagggcagtaaaagacagtcctatattactaaacttccagaacttatcaccccagtaagtagtatagatttatatggaatttggcatcagcttaatacaagcaaatgcattaaattcattagacattcatcatcagacctaaaacatcctctatatatctcaagagtaatcaaccctatcactcctttgagagcattaatgaaagagagaaatttgcctgaaagatctactcaattctagtcctctgaaaccttctctggaatctcttatttaaatgaaacaaaactacaataataacagaagcgtcaatggaactcagactgactatgcctggtctgtgatgctgcccactggcattcataagaattagactcatctattttaaaatatccctttcttagagcaatatgttgtttttcagtttttgattgggctttgtttgtttgtcctactatttcctttatgacatgctattcagggttcaggagaatgatatattctcctcaaaaccagcactccagcctcttgggtgactatttttgttaagaagtttctggctacacataatggaaaaagtgacttggtgcacacggtaaagaattcttagctcacataagaaacctaacatgttttccagacatggacaacaggcagtacggggcaatgctccccgagagaagagaaacaaacaaatcgtaggtgagccctgtgatcgccctgccttactgccaggagaggttctaggttgtggtggagggagggagaaccctagctgagctggcagtcttcctgagttgaggtgacagagtaaaaaattcaggaaggccaaaaagctagaattcacaagataagagtacacaagaggaaagcaccagagatctgcagaaggtctcccttcattcttcatggagtactgatcactgtgtatgtgaggaaaccactaaggccgagggaagagccactgtaggtggaacaatctcctccagatcccacaagactgggaataccatgtgttctatcagccagagtggaacagctttgtaataaacactccaggcttcgggtagagtgctcagagggtattgcttcagaagtggggacaaattcaccataggcaagggctgtcctggccccatctaataaagcataaaagcaagggtctgaagcagaggtcagcaaacattttctgtaaagggacagagagtaaatatcttattaggtgagtgcaaaagtaattgcggtttttgcattgttgaaatttgccgtttgatatttggaatacattcttaaataaatgtggttatgttctacaccattttttttttctttgagacagagtctcgctttgtttcccaggctggagtgcaatggcttgatcttggccaactgcaacctccatctccagagttcaagtgattctcctgcctcagactctcgagtagctgggatcacaggcatgtgcctccacacctagctaatttttgtatttttagtagagatggggtttcaccatgttgtccaggctggtctcgaattcttgacctcaaatgatctgcccaactcagcctcccaaaatgctgggattacaggtatgaaccaccacccctggccttatacatcatcttaatgggcatttctcgctttattttttggctaatgacttattacttgctgtttattttatatttatttcagactatggaaatgatgttagacaaaaagtaaattcgagagattttcttatttaagctcacaatgggtcgtaaagctgcagagacaacttgcaacatcaacaacacatttggcccaggaactgctaatgagcgtacagtgcagtggtggttcaagaagttttgcaaagggggcgagagccttgaagatgaggggcatagtggctggccatcggaagttgatcatcaaagctgatcctcttacaactacacaagaagttgctgaataactcaatgtcgaccattctatggtcgtttggcatttgaaacaaattggaaaggtgaaaaagcttgataagtaggtgcttcatgagctgagcaaaaattttaaaaaatcatcattttgaagtgttgtctactctttttctatgcaacaacaatgaaccatttctagatcagattgtgatgtgcgacgaaaagtggattttatacaacaaccggtgatgaccagctcagtggttggactgagaagaagctccaaagcacttcccaaagccaaacttccaccaaaaaaggtcacggtcactatttggtggtctgctgccagtctgatccactacagctttctgaatcccggcgaaaccattacaagtgagaagtatgctcagcaagtctatgagatgcagcaaaaactgcaatacctgcagctagctttggtcaacagaaagggctcagttcttctccatgacaacacctgaccacatgtcgaacaaccaacgcttcaaaagttgaatgaattggattatgaagttttgcctcatccgccatattcacctgacctctcaccaaccagctaatgcttctttaagcaacttgacaacttattgcagggaaaatgcttccacaatgagcaggatgcagaaaatgctttccaagagttcattaaatcccgaagcatggatttttacactataggaacaaacaagcttatttctcattggcaaaaaaatgtgttgattgtaatggttcctattttgcttaataaagatgtgtttgagcctagttataatgatttaaaattcacagtccaaaaccacaactacctgcacctaatagaatgtatgggccacatgcttctgtctcaactgtttaagtcttctgtggtaatgcaaaagttgccacagacaatatgtgaaagaatggctgtggctagtgactgtgttccattaaaacttcatttacaaaaacagaagggggctggatttgtcctgcagagtatagtttgctgatccttgaaagaaaccaaattgtttctaagtaacttaattgcatcccaggacaaggcccccaaacatttaaaggaactgaaaaaatgataacatccaacaacatgacattcataacgcctgacagccaatcaaaaatggtcagggatgaaaaaaaaaaaaagaaaaaaagaaaaaagaaaaaaaagaaaaaacagaaaactatgacctgcaatgagggaaaaaaatcaatccacagaaatagacatcgaaatgacacaaataatcagtttagtagtcaagaacattaaaacagctgctataatcatatattatttgctcaagaagatagagaaaagtgtgtgtgagcatgctaaggagacaatggaagacataaaaaggacccaaagaaaagttttagagattaaaatatatctcagattaaaaaatgcactggttggaattaacagcagattagacactgcaaaagaaaagatcagtgacattaaagacacagtgataaaaactatccagaatgatacacaaagttaaaagacaaaataaaaataatggagtatctgtgagctgtgggacaatataaaaagacctaatagtcatgtggttggagtcctggaagaagggaagggagagaaaaatatttgaagaaataatagccagcatttttcaaaatttgataaaaatttaaacccatatagatgcaaagaaatcaatgaactgcaaatataaaaaacatgtagaaaatcacatcaaagcatatcaaaaccaaattgctgaaaagtactgataaagagaaaaacttaaatgaagccagaaacaaagacacattatatgcagaggaacaaagataaaaatgaaagcagacgtctcagaaatgaaagccagaaaacagtggagtgatagctttaaagtactgagagaaagtaactgttaacctaaaattatatatctggtaaaaatatatttcaataacaaaagtaaagatttttttcaaacatacaaataatgacagaattcatcaccagaaaacaattaccacatgaaatactgaaataagtcctttaagcataaaataaaatgataccagatggaagtttgaatttacataaggaatatgtgagtaaatataaaatattttttcttatttttaaagtctctttaaaagattattttaaaaagtagaaataacaatgtgttgtggggtttatagcatatgtagaagaaaaatgtatgacaaaaaagatggggtgtgggagagggaagtacacttttgtaagtttctgatactatacatacagtcgtataacatttgcttgataagttaaagatttatgctgtaagccttagagctgtagttttaggagtgctccctggggatatctgtcacaatgtgtggatgggtattacccacatctagtgggtagatgccaaggatgttgctaaacactctgcaatacacaagagaaccccccaccccctaacaaagaattatctggctcaaaataccagtagtgccagagctgagaaaccctgttctacagcaaccactaaaacagaaagcgaagagatgggacaaagaagtcaacaaaggagatacaacggaatcataaaaaatagttcattaatctgaaagaaggcaggacaagtaagtggaaaagggaacaaagaccagatgggccaaaaggaaaacaaatgagttggcaggtttaaactcaacattaataatcacattatatacagtggtctgcacatcccaattaagggcagagactgttagattgtattgaaaaatgcgagacccaactataggcaagatctgactttaggcataaagataaagataaaagtgaaaggatgctaacacttaaaaaagaagcctggagtggctttgttaatatcagacgaagtagatttcagagcaaagaatatgtgtattacaggtggaaagaggttcatctcataatgataaagaggtcaattcaccaaaaagatataataataataataaacctgtatacccttaacaacagagcttccaaatatgtgaagcaaaagctgataaactacaaggaaaaatagacaaatctacagttatagttggggacacccctttctcaacaatgtttataacacataggcagaaaatcagtgaggatatagaagacttggataataatggtgaaagggtgaatgatcttcccctacgatcaaggcaaggcaaggatgagacaaagtgtctgctctcaccacatgtattcagcattgtagcaaaggtcctaactagtgcagtaagacaagaaaaacaaacagaaggcatataaattggaaaggaggaagtaaaactgacttttttcacagataaaataatcatctacataaaaaatcctaaagaatttatttaaaagttaccaaaactaataaatgtgtttagtaaggctgaataatatgcaattgaaatacaaaaatcaattgtttcaatatagtataatgggttcactatataaacggttggaaattaaaataaaaaaccatttacaatagtattatattaaaactatgaaacagggatacattttgacaaaatatttgtagagtcatacactaaaaactacaaaacattgctgagagaaattaaagatcacatatgtaaatacagagaaatgccatgctattgacaggaagattaaatattgttacatcaattcttaccaaattgatttatagattaaatgaaacccaatgaaaatctcagcaggatttttaaaaaatagaaattgacaagctactactaaaaattatatggaaatgtgaaagacctagaatagtcaattttgaaaaagaacaatgttgacggacttacactgtctaagaaacttagtgtaaactataataaccaagactttgtggtattattataaatatagacatatagatcaatggaacagaaagtccagaagttgatctacatgaataacatcagaagtcattaaggaaatgcaaattaaaaccacaatgagatgccactacactaagcaccattataatggctaaaatgataaagactgaccatcccaagggtcagggaagatgcagagcatttagaacttttgcacatgctgccagggatgtaaaatggaacagtcactttggaaaacagtttggcaatgtctttaaaagttaagtgcatacgtaccaaagaacctacccattccacttgttaagtatttacccaagggaaagaaagcataaattcatgcaaaggcttgtacatggatgtttatagcagctttatttgtaggagccccgaactggaaacaacccatgtttccatcaacagcctaaaagatttttttaaaatggtatacctacacaatagaaatatgtctcagcaataaaaaggaataaacaactgacacatacaacaacatggagaggtctaaaaatcattatcctcagttaaagaagtcagacaagaaagagacaacattgtataattccattcatataacattctagaaattgccagctaatctacactgacagagacggatcagtagtttccttggtgtggagatggaaggaagaattaattacaaagggacatggggaacctttgttgggtggggggtaatggaatttttttctttttgggttgtgttgatgggttcacaggtatatgtatttgtcacaactcatcagattaaacactttaaatatgtgcatatcattgtatggtgatcatacctcaatacagccataaaatgttaaaagaagaagaagaagggatagaaggaggaggaggaggagaaagagagggaggagaaggaggaggaggacgaagaggagaacaagagggaggagaatgaggaggaggaggaggagaaatagccaccagtagggtggcaacaggatccacggccctctacaccctgttattcacagtgctggatttctcctaatgccccatgtgattacagggtagctactcacaatccgtcttacaaacttccttgttcacattggtaggaaggagagacagacttcacaaagctccctcttaagacagaaaccaatcccccagaatcatccagcaaacttctcttcctatctcatcggccagaattgtgctacatgccttttcctcaatcctccattaatcagatctaccccattattcagtggaagagggtgcttggatgttgcagaatttaactgaagctgtttttcactacaccatgaaaacagatctttctgttttctactccttccccacttcctcctttcctctttcttctctctctccctccattttcttcttaataaaaatatattataagcagaagctatacatggattcaaaagagtgcttggacatttatgaaagatggagctgtaaatggagacaagatcctgaggtcaggagctcaagaccagcctggtcaacatggtgaaacctcatgtctctactgaaaatacaaaaattagccaggcatgttggtgggtgcctgtaatcccatctacttgggaggctgaggcaggagaattgcttgaacccaggaggcagaggttgcagtgggccaagaccatgccattgcactccagcctgggcaagaagagcaaaactcagtctcaaaaacaaaacaaaacaaaacaaaacaaaacaaaacaaaacaaaacaaaacaaaacaaaacaaaacaaaacacaaccaaaaaaaccaagacagagtttgctctgttatctgctattaatggtgacatttatgaaggactattgacatcccctgctggacaggcagggagcaaggaggtgtggctgctctaagatccctcacctcctaacgtcagccattcaccaattcaaatcttgtgaagaagcaaccatggtcaggcaaaagttgacttctttattgtgtagcaaactcatattccatccagccccatgacatggtctgtgacttgattttgagaggagaaatcggaaagctgcctctctgatgcaatttctcataagtacccagatattagttaatattttataggctaaaaagtagtatccaattttctaattaacattttcttaaataataaagctgatatattgttttaaaaatacacatttttttccgccatgtgattaaatatagctatttttggattgaatggaaaaaatacctctggccatacatatttttacttttcctgaattggccattattcaagaaggattgctcaccacctgtggtctggagggcagaagcttgctaagcaactgaattgttcaccctgggtttcggggaaatgtttaacctacttgatagaactaacggatttgaaagtcctttaatggcaccatttacatgttaatgttctaatgacaaaggtgttttatctgttcatttgaagcagggaaaccctacttaactcaacttagaagcctttgttaacacatgataagtgtcaggaagtgatacaactttccccaggatgaatccagagattagggacttagtttgcagtaggtccctttctccaaggcctcgccaccctctcccagttgactgcctgagagatttgtgcccacaggtcttgggctgaataaagaatgtggaaaggagtctgtgctgccatcaggctgcctgggtggtcagagtctatatatagcgctctgctcacatccctccggaggctttaccattttcctgtaaatggctccaggactggtgctttcatacttaatggccagcttctctgttggaggcctgccctctgtctgctggaatctgcacccaccatgcagaaggctggaagtacctgggaatttacatccccctggggagcagtcctgaacccatgactgacaggtacagcatgtggaagtactccagctcccttgccacttattgggacaactctgagatctgatctaggcctggggatcttgttatgatgcagattctaattcagagagtccgggctggagaggaggctctgcaattccgacaagctccagggtggtcgctgatgttactgatctaggaccacacttggagtcccatgggtctacactgtcttgggaacatccctgtgggattatgtagtttctgccgctggtagcttacttggttgccttccttggcttggccatcttgcaggtctcaatttactactggccatctctgggaatactttctagtatattactttcacacgattccttgtctcagggtattcttctggggagcctaccctaagacaccagatctgcagcaccttggcagggggagggccgtattcaagatgcactgtaactgggcaccagcctccagggaccatccatgctcatctgccactgccttctcaaatcattctaggtgccagtcccatctgattatccatgaacttcccaagcctcctgactttttgctcatgcttttccacgaatctgaaattattgctttcacttttctgcacgctaaaaagctccttgtttttcaaggcttgtttccaatgccattctgaccaagaggccattgctgatctccacattcaaaagcagcccctcctctcttgtgtcttcctagcatgttgcttatgtcttggtttccctgtccaagtaatgggtacaccagtagttgcccttgtcactctcagagttgttgtgatgatcaaatgacaggatagatatgaaattgctcactaagccgatatgatgatgatgatgatcatggaggaaaaatacagcacctgtgaacttccatatgtagagtttttctaaaataaggaattacttcttctttttaaagatctatacatgaaatcttggatttgcagcactggaatgtagggaacaaattgattatgtacaacctgaagccattacatttccagattgggatatcaatctgttattcccagattgggaaatcaatctgttattcccagattgggaatctcttgctgttgacttacagtactgcagctcaactctatcacaccctgcaaaaccaagaccactggcaaagaaggtcaatgtcattgttctgacgctaagacacgtggtgaaacccaacttctgggatactcagagggacactcagggccatcagtttccctcaccagcacagtgagctgcaaagcctatcgcaataggcagagtgggaaactttggggaaagacaacaagtttaatgtttgccacttcttagggaatggtgacagcaccaaggcagaaatatctggagctcagcaggatgtgtgaagactggactgagagaggtaggaggtagaaagacgggtgtgggaacaagctaagtcgggctcctggcttgacaaattattattcagctggcttgcctgaattgtgacatattatttattaaaatggaaggaaaatttaaaaagtgagatgtcagccccaaccccaacctccctgagcacaggcagctggcacaaagcagccagcacaaagcagcctctgcacagcctaaaaactcaacatgacagcagtgtggggaagagaaagtcatcccacctatttagaatcatacagactcaggggaaagcactccatatctgcatgaccttgaacaagtcctctacccgctttacacctcagaattcttattataaaacagggataatcatatattagagggtcattgtcaggattatgggtggaaaagcattttgacaaaattcgattttgttataactattattgtgaatgaggatcatgatagtgattgggttgaaattgtacaaatttttatttaattttattttttgatcatgtatagtaaatggttactggccatcaacttttttacattaagaaataaaccctgtcctcaggaagttagcatgttatcagagtagacagacttataatccaataattaaaacatattactttgggtcagaggacacacacgatcatcttcactgtgcagacagggaaactgaggatcagaaggccaaatggcttgccgaaggtcatgcagctaggaagcagggtcatagttctggcctggtcttctgatccttcattctacctccagaatgactgccctcccctcctcaccctcctgggtcatagagtgggctgtggcactcctgcttacctgttgggtgagtctggatcatcaaggaattcctctaagcctcagtttcctccttttgccattaaaccacaataacttttgcaccaacctaataaaaatgtggcaattacacatgccctgtcttacctcacaaaggtaagattgtgctgtgtgccggataccccgccagtcactttacatatatcaaagggattaaggaagcaatgcttacatgccagatacctggcacagagtgagccctcagtgaaaggtctgagcaggttgagtagctcatttcatcgttcctaaaattccttgttagccctattttgcaagtggaacttggagaggttaaacaattgaatggaggtcacatagctattaaaagatggaactgacatacaaatcctgattttaaaactgtgccctttccaccttttaaaagtacacgagacgatgatgatgacgatgatgatgatgatgatgatgatgatgatcacttctagaagaatgtcaaggtaacctacagcaaaagatgctccagcctccttcggccaccaagaaggataaaaatacatggggtacctgtgaggcgtccttgcagttatctgctgggagcctcccaaaagtccagacaggaaggtgtagccagctgaagagcatacatagaattacaatggcctgtcctggtggaagcaacttgccattgtccgaggcatgaagctccaagtgcagggccatggagcctgggtcacggcaatggcaccattcacctgcttatgtctgattaggaaacactgttggtggtggcagtgcctcatgtcaggaacagctcaagtactaggcattcccctctgggcttgagacagagaggaactgtggaagaggctaaaattcaattctagcaggtgggaagtggctggatataaatattttaagacaacaaatatgattcagaaagctaattggaactcgctgacaccaccaagggctcctggcagcatgacacacagatgggagtaggaatctccgcctcggcattagaatacatactgtaaataccatggaggaagctgtctgtcccctccagggacacacgtctaagtcctcaatagaaagctggtacatgggacagggagaggaaaggtggagaagatgggcactgaacagcagcctggctttttgtcttggatttgtctaatttcctgagaaagtcacttaacctttctgagcctcagtttcctcatctataaaatgggtagagagtgaaggtggtagtgggcagggattagactcaatgatctttaaattgcctagctctttccctgctctggcactgtgagattccaggaatctatagccacctcttggatttcatgtttggttgttgagcagcaagatagcttagggggtttagcacctggactctggagatggacagcctgagttcaaacatcagctctgccacttattgcatggtactggcaatattacccgtatacataggtaagaggggccctgctctgggccccacactttccagggtgtttctctgatcctcttccatctgtacccttccttacaggaagcaagaggacatgtccaccaggcactcatattctcaaactagaccacactctgggtccctggaattctctgcctaaatgactccaagccagctgacagggcccagatgggcctcacctttgggtctatcctctctagggtggaccttggcattgatgaatgcaccctctcctcccaaggggttgcagtttgatgtggagtgtccaggggttggatgtgtgggctggggtatccatgtgcatgcacaaaaactcccttacagtttaagacacagctaaaatagaaggacaattcgggagagctgtgggtcagggacccctctccctgggtactggttctggtctgggattcctaagagttgcagaattctgaattcaaaccgggctttgtagtcattataaaggtctatttttcaagcagaatgatagaatgtatttaatttaactagttgttggctggattcaaaacttgcaaatatttagatatgtgttacatgggcttccactggcactctcgtcctgggcctcacagatgttagtggggaacctggctcctgggaacattatttaaccttgtaatactgggtttcctcctttgtaaactggaaataatattaaaactaacatcatagacttggtgtggtggctcatgcctgtaatcccagcactttgggaggccaaggcaggtggattacttgagctcaggagctggagaccatcctgggcaaaatggtgaaaccccatctctacaaaagatactaaaaaaattagctgggcataggggcatgcacctgtagtcccagctactaggggactgaggtgggaggatcccttgaactcgggaggtccagactgcagggagccatgtttgcaccactgcactccagtctgggtgacaatgtgagaccctgtttcaaaacaaaacaaaaaacaaacctaacatcataaaattgttgcatgggtcaatcagttgactcacataaactagtcctatgctcaattcagtagggcattagctgttgttatttttctgtcactcagacctgggatgatacccacaaatgccctgcagacttcttggtctcccactataatggtttcaacctgtcctgccaccctgcacatggtgactgatccaggtagcctgactacaacactgcctggcatactgttaccttttgaggtcaccttcagcctgtgtagcacccccagcctctgttctctgctgggagctctccaccctggggaaaaaaaggactcattccctgtgtggctaaagccagcaaatgagacatgtgcagtgagctgtttagagccaaaggaaataggcaaataaaggtttcttcaaatgtcaccatcccagctagggtaagatgcatgggagctaaaatacacaatcttcttcttggtagcaaaaaaataagtttgaattcagggatcaggccttgaccatgtcattaaccgtcctgcttggagacctggctcatgataacaagctggtgggaagaattgctcttttgatttaaccttgctatctgtcattaaacagccttctgtagtttctctgatatgcttattttatttttctggcatcacgccagttaaaagtaggataaatgataagtctgttaacgaatacctcagttaattttatggcagagattgcagagcagggagcaggtgagaccattcctgcactgtgggctgataaccatttcgggcatcaaacatttattaaggaccaataataaaagcccttgtgatggtgtaatggctcattctaaatgcttcctgctaataaaatgagcattgatttgaaaggcaatatttaaattccatccacagcatgtcaaggaaaggacaactgtgtctgacgcgtgagaagcacttagccaacttgtttaatcatcagatgctctgtaaattgtgtgtgctcttggcaggtgggaaaatgttccctaggaaatgcttcattaggggaggtaaccacagagcagggttcaaatcctagctccctacatttgggctgggtgactttggactgggtacacaaactctcttagcttttactggctcctgcataaaacagagatattcataactttcatgtgctgtggcttggggagttaaagaagtgattacataaagtgatacagcagcatcaatacattttaagctcctttcccctttcccttaagcttgaacatggccctgctctgggtaaacacatttctagcttcaggtaaattactgtgccatgaacaaagtaacaggctcagaaatcgatgggctcctctctcttgtaaagactacttcctatgtgtaccttgatcgccattccaacctggatacatgtcacatgtccatgctaatcttctgattgttaatatagcgaacttgatcatgacattcacatgagaacagtctttcagtggtcctgaggacaaaatccacacaagccagcactgcctctgagacctgtctcctgcctccttgcgttccctatcccctggagcctcaccgtgcccccttgctgttccatgggcacttaccattccagtcccatgctctgtcccagcttcctgcctttgcacatgctgttccctcttcctggaatatcttccaccacttcttcctgaatagctccttttacccttaggggaagctgaggggtcctctctagaaggacttcagtgttagctttctctaacccccgagcttctcttcgctagcaataactgcattacactgaaatggctttttcttcttctctcttggactgaaggcgagtctcacatctgtctgtcaagcagccatcacagtgcctggcatcgagtcaacattttatgagtttgttgactcagctctcattccttaggaaggctcatccagtctcagagatttaaaaacaatctgtatgctgaggactcacgaataaatctggctcagcccactcccttaacctctctacacacagacacccaactgcccacttacaaatctcactcggatgttcaagcctgtccaaaactgagatcctgatgatccttcccaaaccggctccttctccagtccttctcttcattgcagatggaagcttcatctttcattgttcagaccaaaaaatctgatgttgtccctgttacttcccttacatcctatatctggtctggctgtgattctgttggctctagcctcaaaacagattcagaatatggccccttcttatcacccccattttcaccttgattattgcagtagctgcatatgggctatctccctgtttgcttccacccttgccccctgcagtttattcccagcacagcagtcagagtgatcctgtgaaatgacatcactcctctgctcacaatcctccaatgactctccatcaccctcagagtaatgctagattccttaccactgtgataagggcctacagtctggctcgtgctacctgccaagctcacctccactgttctttgggaaccccaggcaagcccctgctgcagggcctttgcattggctgttccctctgcctggaatgctccttccccagagtcacatggctagcttccttcctccaggtctttcccagatgccaccttctcggagagacctcctctggccaccttacctaaaatttcacctcccaacacatattcccttctcctgatttatttttcttcttagcacttgttcatcatactgtatgttttacttatgtatcttgtttattttctatctcctccaagcagtgaggacatggattttgatctgtgtgttaagttctgtgtcctctgttcctacagcagtgctcgatccacagtaggtggtccattaaacactagtttgttggctcaatgaatgaacgaatgtcttcttcaggggagaagccaactccggcagccctccagtagcctgggactgagggggaggtgggactcaactctggaggcagggacttgactctagaccagattgaagactagctgaaacagcaaagaggcaaaagcacctctccatgagacgtgcccaccaatgccatgtcagtttactgttgccatggcaacatctaaacgttaccaccccctttcatggcaatgacctagaagttaccaccccttttctagacatttctgaataactcaccctttaatttgcatgtaattaaaatgagtataaacatgactgcagccctgcctctgagcttctactctgggcacactgcctatagagtagccctgctcggtaaggagcagtatatctgctgctgctgctctatgtggccacttcaataaaagctgctgtctaggctgggcatggtggctcacacctgtaattccagcactttgggaaactgaggcaggcagatcacttgagcccagaagttcgagaccagcctggggaacatggtgaaaccttgtctttgaaaaattataaaaacaattagctgggcatggtgatgcatgcccatggtcccacctactcaggagtctgagctgggaggattgctggagcccaggaggtggggattgcagtggaccaagatcatgccacttggtgacacggtgagactgtctcaaaaaaaaaaaaaaaaaaagaaaaagaaaagaaaaaagaaaaaaaaaggtgccgtctaacactactggcttgcccttgattccttgaattatttcctgggtaaagccaagaacccatcctgggctaagccccaattttgaggctcacctggcctgcctgcatcagaaccagcaggtggcacaaacaccaacgatgcggatgggctccacagcgagcagcgagtagtctttggccacatgagcaataatggagctaactccccacagggacagctgcgggttcattatgcgtgatgagtttgggagggagaaaatgggctgtttggagtcactgggctgctagaagaaggaatggttttctctctagggaagattttgaataggatttcagagcaggaagatattaagtgtgagatgggaagcagtgtgtgtagggctcagagacctcatccccctagagattgtccgccccatctgggtgcacagtgtggccagcaggtcagcacctcccgtgggggtccatcaaggggtgcagcagggctcttgctggacttggcagctggactaggactttgcacaaaatgtaaagcaaagtatgcacccagaagcccattcttccattaacttatagatatatttaaaaactagataagagttgctatggagagcgaacgtgactttaagacataattgcagttcattgttattttcctaaataatgcgggtgtctacatggctccttcctgctttatttagcttcatctttccagctggagcttgctcctggatgggtgggggtgaccttcattggcctctctctaccctgggggatggtcatgtccttcaggagtgggtggtggataggctctgtctttgtttttctccggggaccaccctgctccatggacacataggatagagctgggcactcactcctctgcgtcctgctcacacagcacttcaaacgccagagagaaaaaaagcaacaggatagccctttgattcagcgagaaaggtggcacgtggtgtctgctccagtgagcccagaaaatttgcacgtgctaaaccagagacacattggccccttttggctaaacacctaggagcccatggcccctttcatccttacccatagctccactagtgcctgtattatgttgtgttagaatccatgtctgtctcagaagcagcccgaaggcagggatcacatccagtggatttttatagccccaaagcttagtcctgcctctggcgcataataatgcatctctgtgtaaaaccatgtgctttttcaaagcttatttttttaggcattctgggtagcaattcctctgatccacccagtctggggttccaccctgagtccagcccacacagttggaggactgactggagccctcataagaagaaactggacctctgtagaatgatgcgaagaaatgttttccttctctccccacgtgcccactcccattaataaagaagggaacttcctccagcacttctgtcctcttgaagcgctgaggctggagtatctactcctctgcccgcctttttattccactcaactgaggcgagatgctaatatgatgggggaatgaccatcagtggcctctttattctcggggttggcaatgttattaaggagtgggtgatggactctacctttattatttttctgggacctgccctgcacatagtacaggctcactcctcaggtccctgctcatatagggtgagcacactggagtgggatcctggctgcgggtggcttgccactctctctctgagtatgtggggcaggccagtgtctagctgagtagggttttcacaatgtgactgccccaagcaaagtccaagttctaagttaggggagaaggttattagatacctatttcgtccttaggtaagtcatgttccctaatctggctcaggccaaagccctgcattttgggaggtattaaacatatacctggcctggaatcaagctgctatttggttggcatctagctcgtgatccttgtgtctattttctaatggtgagacctggaggagtggtggagtgaggcttagattcctcttacctctgagagttgggctttcagagagacctgcactcagtcatgttttccctcaccaatgtggggtctttctcttaagtctggttattgtctggtcttttgtctcatgaatatcaaaatcccctagaaaaatgtagcctgtcattttcccaggcaggccctacttgtctctccccttgtccagctctggtcactacgttcttgttacctgcaggctcagcccatgtccagctgctaagtcagtgagaagccagcctggcagagtatgaggagcccttcatgccatctgggcaggatgagaagatcagctgctgccacccccgggagtcaggcagggagacagcctgttgtggatatttgttgtgtctactgcctgatatccatttcaccctgctggtaactagtccccagttttcctcttgagggctcgcctgtcccacctccacccatctcatgtgcttcagataaagttgactctacccagactccaaaagtggcaaccatgagtaagccacactgaccagtgcatttcatcctccagccaagttgggtcagacatgagcatgtgacccaagtgaggccaattacagccagtgaaactcaattctagcacatgtgtgtgtgcatgtgtgcatatgcgtgtgaacatgtacatgtccactattagagaagtgggctttcatttccactggatgtgaagctgaaaggatgcagaatagggaatttttagcagccatcatgaagagacagaagggccatgaatgaagccaacactgaggaagcagagccagatggagagacaaaccttatccaggtgacagcatttgatccctgggttgagccatgcctgaagtcagaagagtctacttgaatggactattcagttacatgacctgataaggtctcttgtttacttaagaaagtttgactggcattttctcacttgcaaccaaaagtgccctcaccgatacagagccttttgttgccacctgatcaccatgcagtagcctctctaaaccttgctctgtggagtctgcagtttcctctctctgttttcagttagccagagcccctgctggaaagagagcctggccccacaggccagatgcttggctgggctctcttgtcagtcctcaaagccaccctgtgtgccccttgcatcacctgattctgagaacagcacagccaataagcccctgccttgtgcctctggaaatgctgccagcctggatcagtaattccaaaaatatgttctggggaacactggtccttttggatgctctttgggaggacaaaaaggttttcagttttagaaattgacaaagccctgtacatatatatgtatccttcttggagatccaccagcaaatttacttatcaaaggttctaataagcactgctataaaacacagtgttcaacatatcataatttagcatttgaaaacagatttcactatggaacaaacacttttttggttgtaggtataatacctataacaacctgaacatacttggggaaacgcttgactagaatttgcaggagttccttgaacctggcaatttgtacaactggcctcttgctggaggcagccggccattcagttctggttgggtcctgacacctttatcttggcttggtgatatgacatcatttcttccctccagagctcccggcatgccgcagggctgggactgcgctggctgtgccgtttcttggcatacggttcccatgctggtggtagcaggagataatttgattgggctgacaacattcattcttctctgggccacaaagaccccctaattccccattctgagaccacggtttggatctggcaacaagaatgcacatagttacatgtaaacagaaagctcaacactaaattatgattgatgtttcaaataaaatgctctcagggtcaggatgggagatgagtttccaggaagtagcacctgtaatgaaactcaccagagtcataaaaatgcaggatggccacaggaggccacctggagactcaaacctagatgacaggagaagagctaaattttaatatttgtttgctctcaaaacagcagcatcatacttcccacgaaacagaaatgcttgcttggtatcatattgcctcataaatcctcgggacccatttggtgatgaggtcgaaggagccagctggcccaggtgtgattacttctgggattggagggagggagggagagggaaggccaccacttgttggctgctctgcattcatgatccttttcagtcttcctaaaatccagtgaggtaagcagtgtttctgtttggctggggaggaaaccaagatccagaagggtgaagcctttggactaatggaggcactgggatttgaaccaaggtcaacccaaggtcaagccaagcccaaagccatgcccaagaagggatttcttactgatgaattatgagtataggcctctcagatgtggttggtggtgtcccgtgactctgcttggatggggctgtcttccgctttctatccccagacaagcactcagctgtgtgtccaaaccaaggcagagtatccttccatggccctggtctctgattggggaagggaggctctgaggggatacaaataaagtggctacagggtgaagttccagggttacccagacacctctagattggagaagctgtttttaaactgatcctggatgagttactggagatcagaattgccagaagatcagcaggctggtttgcccctaggaaacatcaatatttttgttcgatttttgagtgtccccacaatggtcattccaaggtggtagtggagagctcacgggatggggagccataggatcctccttctggctctgtccctttctagcagcatcactcccctgccctttttctgaggctttgtttcctcatctgtcaattgtgtttaataattcccgccctgaccatttcacaatgacaatggatgtgggttttgattaaatgcaaccaggatttactgagcattaactatatgccaggcaccctactcagtctgaggagaagggcttataaaggagaatcccacaatatccccgtccttaagcgattcatttagtgcgaagaggacggacggaagtggtgaacggcgctttatcctagcgctttctcattctttgtttcatttaaagcattgatggctgtctgaagtaagcagaacaaatattcttattctcatttgacagatagaagaagctaaggctgtggcaagtaaagtcacttgctgaatgatgataataacatctaaagtctatacccacaattcatttgcacagggttttcatatgtgtcatgtcatcaaatcttcaaaacatccctgcgtggtaggccttattactattagacctgtattgtagacaagaaaagaaacagggacagactgtcggttcctggagagaacaaaccagaccatcttcatctatgtattcttagcaccaagaatggcatgaagcaataaaagcggcttgtagcagatgctttcagtgtcctgcccataccgccttggacttaaccattttagtgcacactggccccgtttccaaccatcggcacctgcatttctttatccaagggctctctctgacagccaagagccaagagcacttgttggccagaagtgctagaaagtaggtgcctctcaggagttgctctccaccaaagactccatcacccttcaggtgggagaactccaagtgcatgctccaccctggctcctggagatcccagtgggattaagtcccaatggcccatggtgccaacttgattaataatgtacctggttttggttgtttttcttacctgtcttatttccctgtttccctatctgtgtttcttgggatcatctcccaaataaactacttgtccttttttcagagtctgcttctagaggagccagactaagactggtttcagtgatggcttatggggtgagtggatgagtgaatggagaagtgagaggctgtgtcctatcccctgaccccctgactgggggaggtaaagggaagggtgttggttataaccttgatgtgtttgtttcatggggactgaggtgggtttgggaaggtgcatcttacctgctggtgttggtgtgaagatgcagaggaaaaatactacaaatctgttactgaaggttaaagtcaagaacatgattccaggtggggtaatcaatctacaatgcttaaatcccctcccctggccatctagttcttttagaacagaatgcaagctccttactcagggcttgccaccctccccaacccatcccagactcggtgccgcagtcctacatcttctgctccctgaacacctggagcacttccctcccttgggacaccttcattcttgctggcactttgcctggaatgctctttccctcagagctttgcttggcttactttttctttttcctttaggtttcagcttcaaagtgacctccttagaggttggtttgctgaccaacaaagtcagtcactccctatctaatcaccttattctatttttatcataaaatttgtatttgcagaatatttgcttattattattattatatttattattattattaacttgttctctatgtaaaatgcaggatctatgaaagacatgatcagtcttgttgactgatgtagtctcagccctcagaacagggcctggcacatagcagatgctcagtaaatatctgttgaatggaaaaaatgaaggataagctaaggagatgacagtgatgggcagaggtgtggaggagttccaattgtccatggtgccgacttgattcatagtgtacttgtttttggttgccttcctttcctgtctcatttcccggccttctctatatatgtttccagggccagtgcatttggctgccttctaatgctctggtgtgtatttatttggatcagctgcttgtctttatgagttggtggcaggttatgtgaatggcccaagatcactcttagaggtagaagagccagaactcaagcctcgaagcccaggaagcccatgctgttaactaccatcctacatgacatccgttagggtttactcactaaccctgagctaagactttctgactctttctcccagtcttctgccatgtcacagagatagaggctattattctggttgctgggatatttaaaactttatttataagttgttccagttttgttttttgtcaacttatgagcaagtctataggtcagccatacaaataatttgtccttgtgggggaaaaaaaaacccatgttgcataaaaaggaatgtcccaccttaaagcctctagaccatggtttttcagtctcagcactattgacatttatagccagataactctttgtgacaggggacagtcctgtgcattttaggatatttagcagcatccttgacctctatccaccagatgccagtagcttcccctacttatgacaagcaaaaatgtctccaggcactgccaattgtcccgtgggggccaaaactgccaccgcttaagaaccactgccttgagctataggaaggcaggtgccatgtttgttttgcttatgatcatatccttagtgcctgacccaagttaagtgccccataaatattggttgggcaacagcatgaatacatgagtgaatagtgaatgaataaatgaatgcatgaacatagccagtgtccttagactgagtttcctgaatcccctgacctcaccagctgctcacttcctctgttttccaacatcacgtcatctgctgacctaactgaccagtcacagctctggtgtaattattcacctggcttcccataaactatgtccaaatagggaacaactcctgacttggtctgttttggtcttgagcacagaatccagaaacctctaactttaaccccgaagtggaagagggaaaagagacagagtgcaggagtgtaagcagcaaatgcccccacccactgggggtcatttacagtctctgggatccaattaacaaagaaagtttctgagtggccactttccccacgtcgcccatgtttctccacctcacagacaccagtggagccagtacccattaggcaacattactctgcataatgaaacaactgtactcaaatccagaataagaaaatgggaagcttctatgaagactttaagctgctcaagttcactcagcttcagctaatgaaaatatgagccgcctctgagctgagcctacttcctcatgtggtccagtaaatatcttaatatctccagattccttcctgccttctaaattgtgtgcatcacatctgacatttgcaagttatctatgatgtctgcaagattaaaccagcatgaaaactctccatctgcactctcatcccctccaccccccaacccaggctgccaggctgagctagaatgcctgagactgtgaaagctcagcccatatgggtgagactggaggccagctgcagacctttgagggtgcaattccccaccatctctatttgcatcgcacatgctgagggatttaatttcaagtcctggctgagtgagcaccttctacttagcagggaatatgggggcagacaacgaggagggaggcttggccctgccctccaaaggaaagcctcacccttcataacaaagggcacacccatcgtgtgcaggaccctgcctagatgctccctatataccctcccaggaattcctcaaaagaaaacaggcgtgggcgggtacccttgtttcccacttgagaaactagtgggctttgagtcagtcatgaagctactacttagagggatttgactcaggctagactcttcccagagccagtatgtggctttcagtctttgaccaggaagacagacatttgatgacttagctgtctatagcaaggcaggatgaaagaaatgccaaataaaggtataagcaatgccctgtcaggtacagagaaagaggggattaattcatgtggtggacttaatgagtccaggcttgaagaacaaagaggattttcagtagtggaaaatggggacagttccaggggtgacggatagcatgtgtgacagcgcagaagtgtgtggcccttccacggaccaaggggtttgtggagagagtagttagtagagggatgaggctgaaggtgatgcagctgtgtattggacccagcttgcataagctcaggtgagctgtgctcacctttcccaaattggtgtttggtgatatcatgttgatggcttcaagtcagccatggagggggcatttacatcacggaaatgggcactcaggactcctcccctccctgaaagctggtcgttaaacattaaccagcgcacgctaggtattgggggacatcaccaccaaggtgaccccagggatctgaggaaagtaaaaatgccttatctgaataaagataggataaagtaaacatctctttaaatgaaaaaaaaaaaaaaaaatcaaagtgaagatctgacctgctggggattctcagcagggaaacaggcagagcaggcagccccgttcatctattcccaatattgcattatctcagactcacttattcagaattctctcaccacagatcagcagtttgcctcctccattaccagctaatccagatggacctggtgctaacttaatttccaggataatggagtcctgatctgtttgcacaattggctcttgcatcccgaaagtatttgctgaatccttaaaatcaatgaggctgtgctagaccaccataccctccttcccagtgaagacgggttccaggatccccctagtgcctggctgcctacattaaacacctacagtacaccagctccatgctgggtgcctggtgtggatcctatcgatcctcactatggcccaggaagggtgacttccattttacagaagaggaaacaggagtctcaggaagggcagaactttgcccaaagttacacaggtagcaagcgccagagctaggatgggactccctgtctgtctctaaggctcccaatctttgaattacattttgttactatgagtggtaggctggataactgtctgcacagatatccacgtcctaatccctgaaatcgtgaatattaccttataaggcaaaaggaacctgggaaatgtgattaaggtaagctccttgagataagaagattatcctggattatctgggtgatctcaatgtagtcctgagggtccttgtaagagggaggcagaaggacatgtgaccacagaagaggagatggcacctacgatggaagcaaagattggagtgatgtggctacaatccaaggaatgtggcggcccctagaagccggaagaggaaggaatgaattcttccagggagccttcagaaggggccagccctgctcacaccttgatttgagccctgcaagactcctttcagacttctgacctccagaactgtaagagaataagtttctgttgttttaagccactaaactcgtgacagcagcaataggaaacacacactttccaaagcaagaggaagagaaatgaatcaagacatcaatatgagaaaggaatggggtatgagaagcatgtgtcaagggcaagaaaggaatgggctggcctgcaggtgtccttggctctctctaagcacaggaggtctgagcaggggcctctgctccctcccctttcccttatcctactcctcctagccacattgacttcaatttgaaccaatgcattctataattaggacaagcattcctttgccccctgatggaagaaaaggaggtaactgagtgatagaggccagcacaggctcaagcactggagttctgtctcagctctgccagccactttctctgtgatcttggataaaacactttatttctctgcaagtgtcgtgacttctcagatcccgcccccagatttttatatctatgtgctaagcaaactaatcgtataaacacagtttgggtagaatattgagcccattaaaagagcatccaaaacacactctgtgcagattattttcattcagcttttatgaaagcaggtcttgaggctccttgtgttggcctctcaaagctgcaggctggataacaatcccacagggggaagctccaatgcacattaatatgggaagatttctctggctgccagggccaggaggtgggcatagactggtcctaagaactgaaggtggaaaaaaaaccttgcttggaaagaccagaaacaagccctggtggttcgtagatctgaaggctctgaagatgagcttgcaggaacaagaggggctggcaatttcagggaagagaaggaaatgatgatgggttcagcagtgggtgtgttagtggccagaactctcagagttttcatgggcctgttcttttagccattggaagctgggccttgcaacaatgatgagacaaggcctgggagtgaagctcagtggctgtagcatggcttaactgaaagaccatgacctaggttcctgatagcttagtccctagttcaggtcctgttaccatcgtcctgcggtctctaagtgtcttaaatgtttcaactttagctttctgatctgccaactgggtgagtgataatagctctgtggagctggtgagctccccttctttccccctttccccttctttccacccaggctggatgttccagctgccaatctcaccgattcttagtttgtgtctctggaaaatggggttgctcatcagaaggttgacgcaaggtttaatgagacaggataggtaggtggtccaagccctggaatactgattctctccctggcccctctgggcattctcacaagttgagagaataacaagatatgatcaataacccagagatatgacacccagaggtgagtgtgctgctgttattctttctgaggggggctgagcctatgtggcaggcgatccttgatggtataatgtgcacacttccctgagcccacctggttgttctgccaagtgtggggttaagttcttgtccatctctcgtgcccagggtagcatggcatgcacaatgactgggacctaaatggcaaaaagcctgctatccaagctcagaaacatccctggctcccatctgaggcctctgccagcagctctgggaacccagcaataaattagaatgtcagcatgatatggggtcaggtgctacatcccaccaagactacaccctcttacttgtacccttggctgtctcctccccaagatgctcctctttttcagacacataatacaacactgggctgatggcctgaaggctgacttctcagtggctgcagcctcctgggctgacttctaagggaataggtgaatctgctcatcctctctgtcctctggagctggcagacattgtgtatgtgtggatgaggtggtatattagagctccctggcaccaggctcctaaatctatccctttatccttcaattggtgctggttattgtgtctgggaagcataccatcatcttcaatctcaaagcctaaatcagagtgcctcaaactttactgtacatatgagctacttggagatcttgttgaaatgcagattctgatgtgataggtctggggtggcctgaaactctgcctttataagttcccaggtgatgccgatgctgttgatcccagagtcacagggacctaaggggtcacctggagggaatgacagaaaccacagagctcaagaagaaggaaactaaaattgcatgtctgctgcatgccagctgctgtgctaggtgggtgaaagtagccaccttcttaatcctcccaacagacttgccaggaaaggattaggattctaattgcacagaccagagaacagaagctcaggagctacagacatacacccagagtcacacagctggcaaaaggaggcaagggttgaattcttgcatctggctcatgctcactttctctactaagaggcttccctatacatgaagacgaagccctgtcacaattcacaaatgaggaaatacaccaagaagtaaacatatggaagatgcttggtctcacactcttcatccaaaatgaaaagcaaaacagtgtgaaatgatctctcaccagtcaaaatagaatagatactttaaaagaatgattgcatgtggggaaaagtattgtaaaatggggattctcatacgattctggggagagggtacatttgggcaactgattggaaaacagatggcacctatcaaatgccttaaaaatgttcctgttcagtaattatgcttttgggaatctatcctaaagagtcttgaaattatgtatcctagcactatccaggataaagaagtagtagaaacaatttaaatatctgacagaagaatgagttgtaatttatgaaacatccacacaatggagttttatgtagtcattgaattatgggtatgtaataccatgaaaatgttaatgttataaaggaaaaaagtggcttgcaaaatgatacacagagaataatctaaaattgatatttaaaaaatctaaaacattaagcctagacagagaaaaaagcctgaaagaaattaaaccagtatattagtggttaggttttgtttctggaattaggaatcatcttttaaatgcattttcccaaatgttttaaatatacatgtggcttttttttttttttgagacggagtctcgctgtcgcccaggctggaatgcagtggcgcgatctcggctcactgcaggctccgccccccgggttcacgccattctcctgcctcagcctcgcgagtagctgggactacaggcgcccgccacctcgcctggctaattttttgtatttttagtagagacggggtttcaccgtgttagccaggatggtcttgatctcctgacctcgtgatccgcccgcctcggcctcccaaagtgctgggattacaggcgtcagccaccaagcccggccacatgtggcttttatagtgatttaaaaataatgtcccttcaaataaacttaggtctacagcacttaatccaatgacctaaaattcaaacgtacactaaaattccataaactattcctattttcttattgaatcacatgataatttcaggagacaagtgaccttcacttctgattgaccattgattggcagtagtttcagtttctctgtcctcagcttctgtgattattaggtcggcgcatcaacctaataaatatgtcatgatgtctaagcaaaaactctaacgtcatctagagagtgatacattaacgaaaccgtatgagggataatccattcattcagctggctgtgctctatggatgctgagatggaaggcagtttgcaagtggcccacagtctggaaggggagagaaaccaatcaactcttgctgtctggagtgagcagaggctttcagggctgatcagcacagagtgtgctgaagcggacttagaagataagatgtcctgaatgacgaggaggtgttaggcaaggaaggaaggaagctgatccaagcagggtttgcaaagacttgaaggggagacattgacattgagagcatggtggtttcaaagagccaccccaaagtgtggcctggcatgagggtgctatgcttgggggaggaaagaaatgagttgggaatggctgggatcatcagggactatagatgccatgtggcagggttttcattttatttgaaaggtgatggggagccccaagagggttttaaagaggagaggatcatgacagaattagactttaatgaggatcactctggctgcagagtggaagtgagacggtgggtggttcaattgatagtgtgggtgagcatagagagaaccagtcagggggttgtttgaataattgaggtgagaaacagtgaaggggtggccatggagagagggaggcagttgggagggagatttaggtggtaaatcagtagctacaggtcttgaaaattaattggatgtggagggttagggagagggaggaactcccagtgactgtcagaatatttgtcattgctaatttatgtgtttttgctggcttgaatgttacagtaaattaaagggtagtttgagtgaacaaaatataatttagactttgggtttgtgtgatgagagcccctgctcttggacagcaaaaggccctgtttcctagaggcacttccttctgatggatggttaccccaaatggatgtgggatatgaagggtggcaagtgagagagctataaaagttcagtggtttctgggaagctctcagggatgtaaggctgaacgtctttctgcaggagaccttccctcaaaaggcaaagagaatcgtgatattgtgatttgcttttgtatatttgtgaaatgcacacacacacaaacacacacgcacgtactcattttgcagatgaggctctgcacgattgcgtagtctatttcccatcatgacacttgttatggctgagcgagcccggagcctgagtctttgcctcttgagtacttgccctttcccataggctgtgctgaacgcctttaaacattctgtgtccaccactcccccggagtagcaccttgtaaaccaaagaaaggaactgacagcttgggtcgtagaaagagcccagactaactccagtcagagctgaatccaggttccctctcatcctggtgactctgggcttgtcctgtttgaacttcaggtttcttctctataaatcagagataacagcatcaccttgtaagcctgggaggattaaatgagataatgcaggtaaagcaccaagtacatggtaggtactccatgcctgtttctccttttctttctctgcggagacttttagagcagtgaggctctccctctggctcatgggtgtgctaagtagcagctcccctctgggtcttgagaaaagggacccaaaatgacaggtccagctctgtctggcattccacactgtgcgcagaagccctcttggcgtaacccagccttgtgatatttctgtatagtagtatggtaatttctgcagcaaaacctcccgtaatggcaaagacaaagtcttctttgctacgtaatgcaattcatgcttttaaatgtttttatttaaaataaatcggccgtgctgttgactctggcacagaactgtgggctgtgttctcagtctgcccctctgcagtgcaacggctgcctcggagggaagttcacatcccatccctgggaatctagaagcctgggtggggcttctgatggtggcttcctgatgctgcggggcaggcccaggtctgaggtgcagagaattgggctcgacatgtgctctctcctgcttttgggaaagccctctgactgttctgctcagctgacagcctgtgttctattcatctgagcattctcacatcgagcccagtgcccggcacagtggaactcaaagtctgttgggtgaataagtctccgcttcaccttccctaagaagtgagtaataactcctgccttgaaggactgcaatagagatgcagaagagaatatgccaaaggctgtgcctggttcataggacatgcctattaagtgggagcatccactatcattcttatcattattataagttgagcattgccggggtgggggtgggagcaggagcatgactctatcctatggtttgtggcagcagcatgcctcacacacagtaggtgttcagtcaatgagactggacttaaaaacccattttcccttttgcctccagcagggacggtaaatccgatcaggttgttgctcggggcatctctcttccctcctcactccttccactctcctctccttaccacttcaccccttcaggggacacagtgataacagggcgggggggctactgtatttgatgactcaggatctgccacgcatgttttccaaccacacccgtggaagggagagctgaactgggctgggcgaattatttttggtattttctccagctattctgatctctaacattttgcagtgggtggttagagctggtgattttcctttcttttgtgcaaacgagaccagaataaacagcatagggtgagtcacttcagattcttagtgcttcaattacttaaaaactccagggcctgatgaagcttagaatgtcaccttctccagaacagccacaagcagatgggaaatgttccatattctaagtagttgatggcttcccggcacaggaaatctgctactagctagctactagtgcccagagagaagaggaagaaaggcaaaccagcattcagaaggcagccccccttgatgccaagcactttacacacattacttcatatcttacttcagttaatcttcacgatgacctgatgaagtaatacacttaatgcctatgaggtaataaataacagccccaatacatatttcctgcctccttggtagacaacaggtccactctcagcatgttatatccattatctccttgaagccttccaacaacactatgacagtcattgctgtctcctcttcatagatgaaaacaccgaagctcagaccagcaaatgagaaaaccaaaaattgaacctgagttcttctgcctttaaagcccgtagtcttaagcccctgcatttcccaaactgtgtcctgcgggactctggggtcttctgagatgctcatgggtagtatcagagatgggggaaaagtttcggtggttcaaatggcgtgggaattttggcttgcataaaatcccgctaccagagtgggcacacaagttccttttgaagggccctgggttgtctatgttagagaaaatcgttggctctgttgagcctagtcaagtctgacttgctagatcatgcaagccatttgttcattcccaggatgttctcagggtcccctgggctctgcagagcagggtcatggacatgccacattcttccctgccagaggacccacagaacagtgcagatgtcccatgggggttaagtctccaggggaaatattcaatcaataaaaagcagcatttaaaaaattactgtcatgaaaaaggaacaccattttcttgactacccctgctaacgtctaacagtcctgctaatgtctcatatggcactgttagtggaagagacacgaagaaaacccctagtttaactctagaatagagaccagagcctttgccccaccctggcctccccaactgatcttccagcctgtgtttacatgcctccagggatagggagttggctacctcacaaagcattctgtgctacatagaaaacagctgttggaaaggccttccttctattgacatgaaatatacttccagcagtttttgcacagtggccccttttgcctctgagagctctaaaaaagtgtgaaggccactgtcatttcccctagagtctcctgttctccttgctaaccatccccacttccccattgacgtggtttcccgccccttgggagaagtgaatacacctggaaaggacaggagactcgaggctttgggtccaaatcctggatctcctaactattatagcatctgtatgaccttgggcaattcatttaatttctctaggtttcaatgtctttatctatggaaaaatatataactgggtagaattttttgaggattaaataagttaatgtatacaaagcacccggcctaattcctggtcaatacatgttattgatctcacctctccatctctccacttcctccagctttctagtactctcctctgtagaagtgtgttactatcccccatgagatgcttaaagaattccagatgtagggccaggcgccgtggctcatacctgtaatcccagtactttggggggccgaggcgggaaaattgcttgatcccaggagtttgagaccaggctgggcaatatgatgataccttgtctctaaaaacaaaaaattcaaaaattagctggatgtggtggtgcacgcctgtagtcccagctactctggaggctgaggtaggaggatcacttgagcccaggaggaaaagtttgcagtgagctgacttacaccattgcactccagcctgggccacagagagagaacttgtctcaaaaaaaataaaataaagtaaaataaagaatgccaggtgtaggcagacccctggagtggacagtggcttcaattctttcattctagaagccagttctaggcctggctctgttgtaaatccaaatgagatctgggccaagtcactttcccactctgggtttctgtttcctacatctgaggaacaactctgccattctggggtgcttgtgaatgttcaaatacccttccatattaccgaaaaataaaaaattaaaaattcagcaaatgatctggctttcagaaacaatggtataaaacatttttaccccaaacaaaagaggtagaatcttcaaggaccaggaaccaacatgaccgttgtttttgtttcctgactgacttgaacatttgagtttatcttcaattgacctcagaataataagaaatctaactgatgagagtttgtgtaaagattttaggcttctaaattctgctcctacctggcactgacaagaaaaacaaagttatttaagatgtttattttaaagaggacccaatgaaatgaattcactcctttcagatctgacttcataaaagagccataatgtgcattatgaagaatttactaattgggctttttatagaccaaataatttaatttttgtttgagctttaaaatatgtttattgtacaggaaaatcgtaagatactttttttttctgaaaggtcatcttaaaggtaattatttagaatttagatttagtttattcatgaaaacaaagttataaatggtgatcagattcccctgctagcccgatagatgtttaaaccattcatagctattgatcatttatacttcaccgatgattgatttgtattttcttattgttactgccttctgtggtcctcccatcatgcttcagggctctattttgaatcgagtgtgtttgggaaggctatcctggaaacttaactattccctaggattaggtgggttctctgtagtgcaacaaagagagagtatggtggcttgatacctgggatgctttttgtagttaaaagggaacatagtgactgggggaattcttgtgtctttagtcacaactcatggctttccatctactgcagtaacagttaagcaacaaaactgatgaatagttaaataaaatgtaatatatccatatagtggaatattatttaacaatgaaaaatgaagtactgatatatgctacaacatggatgaacctctaaaacgttataagtgaaagaagtcagacacaaaaggtcacaggttgtatgattcttataggaaatgtccagaaaaggcaaatctacagagatagaaagtagattaatgaatacttagggctgtggagaatgggcagtgacagtaatgagcatgggtttatttagcagggggttgttctaaaattctgttactgtgatagatgcatgtccttgtgtatgttactacaaaacattgaattgcacactttaaatgggtgaattggcatgcaaattatatctcaataaagcttccttaaaaagagaattaagcagagcaattgagaggatatttgtctcttgcctctgctccaacaagagctttctccactcccctggcttaatgctggcctgctgttcacataaataaacaggaatgtttgtagcatggggatttgtaatctagtcaatatatttatatgtttcttaaaagagagcatcttgtgcaaaatactattcaatgaaactacagtctagcagtactcaatcaatcagttcatcaatcagccattcattcattcctacaacaaacttttcctgaccacctagtctatactagatagccagttcacatcaggaatccaggatcacacaagggaaaacaattctaaccagaagcccagtttcttaccaggtagccttgttctcactagggagtcaggttcacatcagggagccgggttcatactaggaaatcagattctcaccagagagccatgttcagaaaaacgctttgatgtactaaaaggcctaattaaccctattttagatgccaacctgttctcacagaactgaaccaaaacacagacaaccatctccttcccccttttctttttttttctttctttcttttctttttcttttttcttttttagaaggagtctctctctgtcactaggctggagtacagtggcgtgatctcggctcactgcaacctccgcctccagggttcaagtgattctcctgcctcagcctcctgagtagctgggattacagatgtgtgcaactatgcctggctaattttgtatttttagtagggacgggggtttcaccatgttggccaggctggtctcaaactcctgaccccaaatgatctgcccacctcagcctcccaaagtgctgggattacaggcgtgagccaccatgcccggccccccttttctaatgtatgtcccttaagagcagattagttatttttaaaggaaaagtcaacaagcatccaaacatttgaggttatcaaccaaattaattagtgtactttgtgaaaagagttccagcatggcttcaaaaagggaatctgactggcgcatttaaatatttccttatataatatttggtatcaagccaaagagctttgagacaaaggagcctaaaatggaagtgttaaggtcaccaccattacggctctcttagaaatggggtggcagtattgcagagaagacggacagtgcgagtgaagcgcagcaccccaaatcttactaggagcctcctccatgccggatgctttgctaggacctacatggggccgggatcacagagagtagagacctagactctgtcttagagggacagggtttgctgggagaagataagtcaaagggcaatgaagtcctggtcacagacaccagatttttgcacatgacattagaaaggacagggatctgcaggcacctccatttgatttcttttcaaggattttactaatagaccagcttctgggaaagggctctcattgtggactacatgaggcttggacacgttgtctcaatatggaaaacaacttcagatgcaagccaagaacacagggtcaggtgttgtgcatgtaagcttggcaaatcctatcataaaaccaatggggctgtgttagaattggcgttctctctgtcttgtgttaattattatgcacttgctttctgggctttgaattattcatgaggccagatataaaatacgatgattattggtaatctccagctgtggcacctgaatgtgcagagacgccacatctgtttctgaaaactatggtctgggctaaggaacttagtgtgctttggaggagcagaaggtggcagagaggggaggagagtggtcagaggagtgagatcaagaggagaaaggtaaagtgatgttgctctcagagaaggtggaagtgtgtcgatcaacaaattggctaaaatatagagagcaagaatacggatctaactagaaggaagagctggatcaatatcgaatgaatgaataaatgaatgaatgtatgcatgtggaaacagggaggaggggaggaaagtgcctcctttgagccattttatcgaattctcactgccattcaatgaggcaaggagaaaatggacgcacaccttgttccatttaatcctcatgacttatgatatgggcatttgcatcagtgcttgacagtgttggcagctggggttgcagaagaggcctgcagttgctcagttattaatggggacttcagatcatgttgccctatacccactggccagacatgatttggggtataggtgggcaaagctataagtatcaggtactactggtggtaggaagtgatccaatgccttccttccctgggagaaggagtaactctacagagaatgctgccagactgagtgcccagtcccttggacagagtctgatggggagctgatagatgcctcttgtctctccacccactcccatctctgctgctcttaatgggagacctggcatagaaaaggcacctcctgagtatgaacaggtcagcctttttgggagggcagaccagcgttctatcaaaatgaaaaacccttgatggctttgattcagcaatcctggggaaatcgttgcatatgttgaataccaagcctgtgctgtggcaatgtttgttatagcaagaaactgaaaacaatccacgagtgcatcaacaggtgatggttcagcacaatgccctgtacagagaggtgagatattgatcccatctctgccatttactgtctgcgtgattggagtaagttactaacatttctgaatctcagttttctcgtctgtaaaatggggatgataacagtaacttcctcacagggttattgcaaggattagtatgtgtaaagtgcttagaacagtacctggcatctagtcagaagttagtaaatgtgagtaattaacaatgccccacaaatacaaaatcattaataagagtaagccctctgatacctaggttttgccctctggcccagtggctatctagtcatttctgctcccaaggggtcgctgaccccatggaggttagggggactgggactgtgccctaatcttacagctcagaaagtgaaaagggtcaccagatcagtacagctctgagcagccagccaaggcttgggtgggagccaaactatgcaggcagcctgacctggctcctggggctaaggcaacactggccatagtctttggtctcagccaccagcagccaggaaaggtgaggagatattggaatttgtgttccctggcaccaaaggaggccatggaagagacatttccttagcccagtcactaatatggttacccaaaaccttcctaccatcatcacattagactttctttcctctctcatttttttcattcatttatcaaaaattgttagctctcctaccatgtgccaggcagtatcataaagattctaggcactcagagacaaagatgtctcccatcttttgaggcacttgtggtctactaggaaagacaggcaagtaaacaaataattacttgcctgtgtgaaccccacacaacaaagacatcatctgctttgttattggtttccagccttagaaattgcctagtaacaaacccaattggtttgttattggtttgttacttgttattggtttgttattggttttcagccttagaaagtgcctagtaagtagtaagctcatgctaatatttatggaatagagatgcccaataacataatctgtacaaggtacagaagtactatacactaactctgttatgaaggcaagaaagtcttagaaagtgatgtataaatagggttttggaagatgaataggagttttttaggttaacacagcctgcagtttaagatgtctataacatagctaaaattataattttgaggccacagaaaatcactatggtgcttgttctcagattaatgaaggcagaagccagcaaggaaaagaggttatgaatgtctctcctcttcttgaccccccagtcactctcgtcatttttttcataaaccttggcgcaattatatataatccacttatctgtttatgtgttgtttgggtctctgtctctccagctcttgtaatggtgtctgacttataggttagtgctcaataaattctcactgagtaaatgaataaatgggaaaaggaagagaaggaaagagtgggccctaagtatccacagccaggggctctttccctgcctgggtagatctgagacagtgctgtccaatagaaatataaaaagagtctcatgtgtaatttcaaattttctagtagtccttaagaaaagtaaaaagaaatgataaaattaattaatattatatttttcactcattacatccaaagtaatgtaacttcgacatgtaatcaatatacaaaaattactgagatttatatctcaataatattattgaaaaaaaggtcaataacttttttttcaagcctttcaagcatttgaaatccagtgggtgttttttatttagagcacatctcagttaggattggccacagttgaagtattcagtagccacacatggccagtggctgcttggcagcgaggcccaaggcctcctccactctgttgcccagcatagactgtcagtggggcaggcctgggcttagcacagaacttgccaccctagttggaggggcactggaggatgtctgatgaaatgggaataaagtcttctagaattgtgtcatttacccttttgccccttctccatgtggccaccctggtatgccacctcttcttgtccctggcatatggagacattcccaggcccctcctgcctgcagctccagtacctatgtttctcttttgtgctctccccttcagcttggggagaatttagcatttccacagggatttgcattgatcaagtgtgacagtgagacccagttcccttggacatttaaaatatcaggacaaaggagagtgaggaactgggctgtaactgtgaagccaaggacacctggatgctgttagacctcttcaactgtcctttccaaagcgaacctgacctccaggccctgtagttaaggaacaggtggaaagtaccacaggccacagtacttaagccatcccaggcattgttctaagagctttgcatatattacctcatagaagccacataaaaacccaatctgataggtgctcttattgatcccatttaacagataaagaaactgaagcacaaaggtgttagacaatttgctccaggattcagctggtaagaggccagcccaggatttgagctcagaccatcttgctccagagtctggcccttacctgttgtgctctaggaaaggtgcatatgtgactctccgggaactaggaagagacagagatcacttctcactgcaggggaagaaggaagtagagagatgagagaggagagatgagagagtatggggtccagcagataggtaggaactttgaaaagggacttgaaggaatctacagagatgacagggacagtgtactccacatggggtccttgcttttctcctctgaggcactcttagtgttgtcagcacttggacagagctagaaagcctcctgtgctgtcttattgtttgggtgtaatttcaaaacccagatagaacgagagcttaatgggtatgaagtctccttttgggatgataaaatgctctggaactagacagtggtgatggttgcagaacactgtgaatatactaagggctactgaatcgaacacttgaaaaacgatggtgaattttatgcaacgtaaatgttatcacaattgaaaaaaaagaaggggggtaagaggagatgcaactttcaccaggaagaaggaagaaagcaaagcccatgagaagatgaggctgcaggtcctcccgaggaggcaggcccatctgcacgagggtgtgtcacatccacgtgcgcatggcacgtccatgtggtgtgagtgcgtgacatccatgagacacatgatagccacacaatatgtctcccactcatgagtgtgtagcacccaccatcccaacaagaagtcaagtcagtctgaaaacttctagcatgtgagagtgattgtgtatcactcggaagagagtatgagtgacaactcagccaggctgcgtcacgtgtgaatgagctggagtcaaatgttgacatcggcctcctgccagttacaatctacatgcacttccactatccttccctgtactggagccaaggcctgttggatccaccagctctttccattaccccacccaggctcgtgcctccatccttccaggaggaaacaaggacacaaaggtggcacacctgcctcccaagttcctccctgtcctccaggagctggatctcagagctgctaagacagaagccaagacacttgcatggggatcctgagctgaggttggggaagagaaaggtacccagatatgctcagcaagttaggcagagactgagaagtttcatccagaggaggagccattcaggaagtgggcacaactagcctcgacatttcccttgagactggaaatacaggaacacgtgagactgtttaaagtggggtggtttggacaaatcacctagcttctctgagatggaaagaggtgtaccaagcaagaggagagctgagatggaggaggggataggaaatgcggggggaaagtggaatgaaaatggaacagagctgataagccctacggaaattacaaatagccttcctggcttatccagggttcattcgttcaatcattcatttgtgtatttattcaaaaaacaccactgtgctgagagctggggaagggtctgaggacagatatgaggaatgtggtctgagcatggggacaggtagaatccagggtgacaagtgccctagccgatgtctgcactggctacacgcagggcagagaggagggcaagtgtttccacctgtgggaggacgctcttgggcaacatttcagggaagagaaaacgcctgagctggaccttgaaaggcagatgtgtttttccatgcaaaagggagagggaagatacagtgtgaagagcattctgggaggggaacagggtgagcacacacatggagacatgaaacggtacagctcatttcgggaattgaaatatggccggagcctgggacgcatgggagccaataaatagacgtctccttgttgctggtctagctggctgaccttggaacaagctgcttttccagttttgagcatgtctcagtctgtacaatgagcgaatcagattagatgtttctcaggggactttccagccctggctgctcctggagggagtgagctccctatcaaccaaaatattcaagtggagagcaggcaaccactggtgggattctagcctttgatggacatgtgaactacgtaaccttgaaggtcctttccagacctgagttgtcctgattctgggattctggagcccagatggggcctgtgaactgtgccaggcagccaaggatggttatgcaggacatctgttccctcccctgcatcccaggtgagacccctgctgtttcatgaaagtctgatgtacacacacaggctggccattgaatgattcattttctggggtgaggcacaggactaccttccactctgcctaataaatggtcagaagcccccatggggctaaaagctggcagctggccactctaaagtgatagaagccagctatgggctctgacttctgctatattaactcaatatgtattggagcctctactttgctgggctcagaagttgctctggtgagactgtcactctttggcagaagccaatgctcagtgacaggtaatgagctatccaggacaaaaggaaggtgacctgcccaccagtcagagaccatgaccaagggcaacacctgccaccacttttgtcttggtcactgctcactctggctgcagaaccagaggcaagtggtgtgaaggtacagagcagggttgtggactgagggggccggacttccagctcagctctgccacttcctcagcttgggtatgtggaagaaccatgtcttctccataagcctctgttttccttgctgtaaaatggggataatcatgactgtatgtaccaaataaaataatggggtcagtattgtgtaagctgtcacacacagtgcgaagggggtaagaaggggggtaagagaagatgcaactttctccaggaagaacgaagaaagcaaagcccatgagaagatgaggtggcagggccttccaaggaggcaggcccatctgcgcaaggttaatgctgggctggggttaatggtgaggttcccacttcaaggtgatacgcaacgaaaatacgttctatatggtttcaatataggcgtctttaaaaaattattgatttaaaaattattgatttgtgaatgactttgcaggaatatatctcttgtatcttgtgcttgggagagagaaacagagaacctttttctgttaaacagaggaagaactaataagctgcccagctttgggagcctaagacagggctctcttgtccttagggagctgagcatcgaggtgcaaagagctggacagaggagttgtctcaggatcaaatgtcaacctgtgtgctaactatgctgcccagcatgaggggagaggtgtggcaccaggcacgttctcgctatcagggtcaggacatggcatcaactggctaggtgttcatcttccctgcctttcagagtaaatgtatctccatgcctcccaggcctaggcctaatatctgtgggagttggcaccccttggagagggaattccagattgcgggtacctggagtctggtctggggaagggggaatgctcatgggcatggctcaaggactgctcatgctatacagaggtgcatggctggatgggggccggaatggggccccgtgaagcatggggtctgggtcctagggtgtctggttgcccctagcttgtgacggctttctctcctcatggctggaccctgttgccctgtccccaaggcatttgctgaagtcccatcccagacttgatgggccctcactgctgatccccacctccaaactgacccttaggtgctgagttggagacccatcagatcgaggcctgatgggtcactgtgatcagggttctggaactgctccctgaccccattatttctcaggcctagagaaataggcctgggcagaggagtagcttcccagcctgcttctctggttaggatcaagtcttgcttcagcatttctcaacaatggggtcttatgctttgctggcatcactctgccagcaaaacaatgtttgctcaaaattgagatgagcaatggggagggggtgagcagggagcctgtcctctcctttatattcattcattacttttctttttatccaacaaatatttattgtctgtgatatctccagcactatgttagatacttgatctgtgctcttcacagtttatgctgacacactcctaaataaatttggaaccttgggatgaactgaatgtttgcctcttccccttcaattcatatgttgaattcctagctccggaagtgatggtatttggaggtggaggccttgggggataattaagtttaggtcaggtcatgcgggtggaactatcgtgataggattagtttctttataagaggagggagagagaaacttccttttcccgtgccatgcaaggacacagtgagaaggaggccctctgcaagccaggagaagagccctcaccaggaactgaattggccaaaatggatccttaatcttagccttcccagtctccaaatctgtgagaaaataaatttctgtaggtaagacatccagtctatggtatggcagcctaggtatggtatggaatggtatggtatggtatggtatggtatggtatggtatggaatggtatggtatggtatggtatggtatggtatggtatggtatggtatggtacggtatggtatggtatggcagcccaagaaaactaagacacacctcaaacatttataaacagcatctaaatatactttgttttgtatttgtgctttaaaaatattttcactacaacttcgggctgcaaatttcccttgttgagtttatgtaaattgtcaatcctacaacctaaatggtaaagccatcatcattgtcaggccaatcagccaattcagaatctttttcagccaaaaagtctgacattttttcaattcaaataaacccattaatatgcatctctgtggccacttctgaacgctaagagaggagagagatggacacaggtaatgcagagtccttggcacctggctgccctcttcagtggtgcttgtattgtgctttgtcctgggggtcttcttcctctggagcgatgcattcttgtatggcccctttggtgggcaccaagagatgcccacccctcagggcaatgtcccctagagggagtgaggcctgtctttcacttgtgaagtgggggaagggggctttggaagggagacctgagaaggcctgtcctggcagactccagctacgtgccctggagaccacgtggaaactgacagtctgggaatggattcttttaccactttctgtgcctgtgcaccccttggaaattcctcatataccctcagcggtctgggtaagccatcaacttcatcagttgaagacagctacactagatgattcccaaagctcccttctaacatactaggatttgacatcttgagccaaagcctatgttgaggctccacctaaatcccaaatcctcttttcccaacccccacactgcctggctgtgcgacagtgccctcatgcgctaggaggttttccctctagcagcagaaaactcacacactacaccaccgtgtgtgtcactctctcctgagttgaattctactatctgacacaattcacatacacacgaactctttccagaatttaaaaactgaaatgacacttgaggttacggaattggaaattcacacacacacacacacacacacacacacacacacacacacacatggcataagcagccattcaggtattctgtacacaaaagtctccacatctgcctttcaactggtttttttttttctgaacggcatcaggctgggtggatgtaggccacacatgctgtgtaggctgacgttgctttcacaataatgattagaaggtctcaaattccaatgtcagatgacttgaggtgctagctctttaaaaagaatccctcgttctacagaaaacacacacacagacacataaacagacacacacacagatacacacacttattttattttatgaagcagattgtcaagagaaacctccggtgcacacgcttaccaagtgctgcttctgtactcttggttttctttaggcgggacagccctgctgagccctggatgctgtattgtaaaagggaaagtaggtcatggccacaggctgtcagtcctcagcataaatcagttgcagggagataaaacctgtcacccacaaggaagtaggcacgtgggcacccacatggccaccctgtcttcttctctaaggctgagacaacccatgttcctggggaatgcattttattacaaccaccagaatgcctggagcgattttttttctttgaagttagcagctttttaaaggaaaggtgaagttcgtaaaaagccatggatgttatataactacaccatccatcttttatgaggttcagggcaggctgaacacctccttgtaatttactaaaagtggggaccccagaggctcttactaggtttctcagcttctctgtgccttaggaaaagccgtggatatgtggccctggctgggcccctgcagagtccggcttggtggtaggctggcatggtggcttgtgggtgatgtgtggaagtgcagcggcagaccctgtggtgggaggtgagtggtttcagagtggccctcttctctgcccacaggcactcatctccttcatctccagggtatgaggagggatccagtcttggatgctaattgtcttgcagttcgttcaggctgcaataacaaaagcaccttagactgtgtggcttaaacaacaaacatttactgcccacagttctgaaggttgggaagtccaagatcaaggcaccagcaggttggaagagggactgcttcccatttcctaaatggcatcttcttgctgtatcctcacatggtgtaaatgggaaaaggaactctctggtgtctcttttataaaggtaataatcctagttgtgagggctccaccccacgacctaatcacctcccaaaatcttccacctcccaatgccatcacattaggggttaggatttcaacatatacatcttggggagggggacaacaaacattcagaccataacactatgcgtgcccctgagttcctctgtgagttcccctgtgggatctggctgaggccagacacaaaactgcggctgcatcctttctggtcttctcctgcttccttcgctccctctctcccacaggcatgtggctctggtcccattttacttcttctccattgcacttgcctatagccctctgttctggaaagcaaggttcactgctggaccctggggcatgagacataagacacacacagccagagatgcaggcagccacagtggctcatacatcttcagtcataggaataaccatatacaaaagcaaaaccaaactaggtcagtgtgcaccttctccctcccccttcccaggatcaggtagtccattttaacaggggcaacccacacacagggctccactcctggcctccctccctgtggggctgacgtgggagggagttctctggtgctggcagtgttctagaccaggccagaggagagctgagccaggatgagtcatgcatgggctgggaattggtgccttccagctctgagagtccctgctctaattccacctcaaatcatttttgtaatgagtcacagtataagtacaaattatttaaacataagtggttatgggaggagtgacatgcagactaggaaagcccgtgggtaaccatagctcagctccctcaggtaacagataccagccgggcttctcagtgagtgttcagaggagccctctgtgctgccctgtctacgtctttgcagaaggaacctgccctggacaggcccagccttggcctccatggaggcagccctgaactcttctttggtgccagattaagatgaattttgccccaggatggatcagacccagagtcacacccataactcattcattcagtgatgagatttggggctttttgagctgatgatatatcattattattattattttttttgagacagagtttcactcttgttgcccaggctggagtgcaatggtgcaatctcagctcactgcgacctcctcctcccgggttcaagcgattctcctgcctcagcctcccgagtagctggaactacaggcgtgcaccatcacacccagctaatctttttatttttagtagagacagggtttcaccacgttggccaggatggtcttgatctcttgaccacatgatctgcctgcctcggcctcccagagtgctgggattacagggagttgatgatatttagacaagattttagacttagaggtgatgggtgctagaatgggttaagacttctggggatgttagtatggggtgaatgtattttgcatgaaggaaggatgtgaaattttggtaggcaaaagggtcggctgtagtgagttcaatggtgtctcttcaaaattcatgtccacctggaaccttgaaatgtgaccctatttaaaattagggtctctctcttttatttatttattttttttggaatagcatcttcctctgtgttgcccaggctggagtgcagtggcacaaccacagctcacaaccttgaactcctgggctcaagttatccactagcctcagccttccaagtagcttagactacaggtgcacgctactacacccagctaatttttgtttttgtaggcatgaggtcttgctatgttgcccaggttgatcttgaacacctgggcccaagtgatccgcctgcctcagcctcccaaagtgctgggattacaggtgcatgccaccatgcctggcttgaaaatagggtctttagagatgtaattagttgaggattttgagacaaaatcatcctggatttagagtgggctctaaattcaatgatgggtatctttataagagaaaacagagggatatttggacacagagagaaatgggccacgtgtcaatggagggagaaattgcagttatactgccttgtacaactcaaggaactcctgcagccaccagaagctggaaatcttccttagagccctcagaggaagcatgagtctgccaacacctcgattttggactcctggcaccaaaatgtgagacaataaatttctgttgtttgaagccacatgttttgtggtaatttattatagcagccctaagacaggagatgaagggttcactggcatgccaaggacatgatgcagggacatgtgagtgtgtggtggtgtgtacctgtaatcccattttgatacagggacatgaagagttcatagtcatgctgaggacagtgctgctgagaagtccatcatccgggcaggccacagagcaccatcagagccagaagaagttattgttggcttccaaaaaagtcccaagtggatgttagtgaggcacagaatgagtgccatctagggctgggcctgaggctgcagaatggaggccacagcagggtttgtggtgggagaaggtattggtctctgcaattaggtagacctgacattcccacttagtagtttttttttttttttaatacggagttgtgctcttgttgcccaggctggagtgcaatggcatgatctcagctcaccgcaacttccgcctcctgggttcaagtgattctcctgcctcagcttcccaagtagctgggattacaggcatacaccacaacactcaggtgattttgtgtttttagtagagatggggtttctccatgttggtcaggctggtctcgaactcccgacctcggcctcccaaagtgctgggattacaggtgtgagccaccgcgcccggccttagtagatgtttgactctgggcaagttctttgctttgagcttcagttttcatatctctacaataaatgcaatgtatctatgtggcagggttgaggcaggattaaacgaggtatgcaagtggcacagggtggatactgcactattagtctcagcccatcctttggtgttgctattgctaatgctaactgacatggctggggtaagtccacgccttctgggagtctcagtcttctatgtagccatcactcttgctccatctctcactaaccaccaacgagaacttttcctgtgcctcacactgtggtcaaggacttctcatacactatctcactaaatccttcccatggaactgggagctattgttaactcattttacaaacgacgaaacaggattcaaacccggtaggcctgtgtggttccgaagctagagccactcagcaatgtaataaaggcggctgttgttttcatggtcacaggttttgtttttatttttgttgaaagcaccatttctctacctgatttcattaccactcgggcctgaagtcacgtgctggtgaaggatcccacaggtgaaatcgcagaggctgtgctggagaaaccctgtgagagctgcacgacggcactgcaagatttttggactacgaggctgctccttggattcactcacccggagagacgaggaggctctgggactccagggaggctggcagtgtggcccagagcaatgttgaggctttggctgcagggagctgcttccttactggtctcctgcttcctctgttgctgccctctgggctattcttgacattagagccagcaaaggcaacacgctgctgcttggctcaaaacttgccagatgtctcccatttcatgcctagtaaagctgcatgcctacaacggcctgccatctctgtgagatttgacctcacctccttttccatctcctgccctgtcagctctggccagactctcttccctgttgttgctgaacacaccgggcccactcctgcctcagggcctttgcgtttgctgttccctctgcctggaatgttttccccaacacggctcccccaaccaatatccacaaggctcactaattccctttattaaagtctttgctcggccgggagcggtagctcatgcctgtaatcacttgagatcaggagtttgagactagcctggccaacatggtgaaaccccacctccactgaaaatacaaaaattagccaggcatggtggtgcgtgcctgtaatcttagctactcaggaggctgaggatggaaaatcatttgaacctgggaggcggaggttgcagcgagccaagattgcaccactgtactccagcctgaatgacagagagagactctgtctcaaaaaaacaaacaaacaaacaaacaaaaagtcttagtcccagcactttgggaggccgaggcaggcggatcacaaggtcaggagttgaagaccacactgacaaacatgtgaaaccccgtctctactaaaaatacaaaaattagctgggcgtggtggcatgcgcctgtaatcccagctactcaggaggctgaggcaagataattgcttgaacccgggaggcggaggttgcagtcagccaagatcgcaccactgcactccagcctgggcaacagagtgagactccgtctcaaaaaaaaaaagtctttgctcaaatatgaaccctctcctaagagccctgattaaaattgtaatcccccggccccagaaatccctgctcccatttcctgcgtttgttttctacataacactgattccatctgatagtctgtatgtttcacttatatatttgtttacccttatactccttatggcttaagtgaaaactctgcaggacagagaatttgttttttgtctcttttgctttctgctatacactctgatgcctagaatactggcacacagtaagagttcaataactgtttgtcaaatgaatgaataaataaatgaggattcttaagatcatacagggtaattggcctgggtgctcagtgagtgttattagccttcccaccctgccccccacacaaaagtgattacaaatttagaagaaggtttgctgagatctggggagagccatagagacatttgcaaaccatcccaaattcaaatattgggtggtattcagtgtctacttacagtcagcactgtgcttgctccctccataagttttcttctttctagactccaggcctttgcacatgctgttcttaaatgttccttcctccaggaagcctgccctgacttcccaagactaggttaggcctcccttatccttacttccccccacgctgctgcagcacagcattgttctgtatctgccagttgacttgcctgtcaatcctactagactgtaggataaaagtgaaatctaaatctggcacatagtaggtacacagtaaaggtttgttggatgagtcttcaacccaggagccaaaaaccttcccaaatggacacagcctaagatagttgatctggatgctttgggcttatgagtgctggtcccatccctgccctgacctgagtctacagagtgagggatgctcccaagttgttttggtggagcacagatggctatcacaaaacactgcctcccctacttcattcccaagatggaggtcccaggccagagcagcttcacacatcagacctgtgtgaacctacaggtttttttttggatctcagctcattccagaggagttctttcaagcctgaaattgctaatgctcctccttccagaccctccagccagtggctgccttttgttgaggttggatagagaaaagcttctctaagaaagcggcctgccagagagatgggagatgcttggatgctaggcaactggtcagaaagcaaatattggcctcatctccagggaccctgccaggcactgtgcagctcagacgtggagttctttgtctggatgagagtttgccatttaattagattccccacctgatctgcctgtggggccataacaggcaacgagaggctgtcagcatccctaccccaggcagccaggagcgggaaggagctgtagcattggaaggtagggtgggtctcccatctcccaatcctgcggggtccgtgccctgctggttcttgctccactccctctgggtgtcttcctccataaatcaagatgctcttagggacctattccctgtcctctccatagccagcccttccaagcaaagcaaagcaaacaaacaaacaaaaaaacacctcaaaggcaggatcgtggcatgccaatatctggtgtttttagctcttcagagaattttaccgtttatggagtgcctattacatactacaaatgaggcattggcatgtacattatctcacttatcacccagacctaccctgtaacataaaaatcatagatcacctttcatagatcaggacactgaagcccaggcagcatgaaagcagcgttcatggtcacacagctagtcaggggcagaactgtattaaacccatgtctccttcattccagtttcttcagaatcaaaccacattgtttctcttaaatgccaccctgttttatgaatgggttaactgagtattgggtactttattaagacttacaggatattggttcttgaacagaggtagatccaggaaaacacaagcaaaccaataagtaagctgactctagagaaggagatgctacctctattcctttgctatttcattcacgtggtgggagttccattcatgcaatattcagcttttctcctcaacccccttccttctctgctctcaccacatggggagggctgttccagccctgtgctgcctatgattgcagggggagtccacagaattctggcattcactattaggttaggaagatcatttcctcatagatacaaaccatgcctcatagagaccttattagtcataaagataacattttggcctatatcccattttatcttttcttgtttttcaaatggttccaaacctgggcaggaaagaggactgtatttatgggacattcttgaagactgtaacaatcctgtggcctaattccactggattctacccaggacacatgctctatgagcccaccatgcacacagattgtgcctctgccagtggagatatctaaggaatgcatggcccctgtcctcctgggcttcacaaccaagctggggagacacagccaagccacaagatgcacctggcaattctaaggcagcgtactggaacaccttcatgatgccagcaggcaatcgtggagggatccacttaaatcaatattctagttgagatttgctatatataaatggaaaacccaatctcaaaacactggagtacagtaataagtattctccactttaactccgaacctacacaaaataggatttattctggccaggtgcagtggctcacgcctgtaatcccagcactttgggaggccgaggcaggcagatcacgaggtcgggagatcgagaccatcctggctaacacggtgaaaccccgtctctactaaaaatacaaaaattagccaggcatggtggtgggcgcctgtagtcccagctactcgggaggctgaggcaggagaatggcatgaacctgggaggcggagcttgcagtgagccgagatctcgccactgcacttcagcctggggacagagcgagactccgtcaaaaaaaaaaaaaaaaagatttattctctcttcaatgaatcagaaagtcttccatgatctttcagaaatttaggaaaatcacaactgcctgtgttttatagcccagcactatgaccagttctttcctagttaatcttcaatgcaaccctggatagaggatattattatccccatttcacagataaagaaaatgaggctccaaggacttaaacaacttctcaggatgacttaaataggatttaaacccagtctgtgtggttccacagccaagtacatcctagcactcctcgctgcctctcgataaacataagagccttaagcccttgacattcatgagagtaatcccgagacgtccgggagttttcaatttacaaattccactttagtgtataatcgcctccataaaacacctatttttcttgctgaggcccataccttctcagtcctccttacacttcacctatttctgtttccatcaatggtggttaaggttctttccagggcactttgcttattttgtgggggttgttgtgcagggaaggtgggcagggagtaagagatctggatcgagaggtgattgctggactgcctgcttggtttacctgcaagccacaccctcactcctgcacaccagcccagctcactggagcacctggcagaaatcagaagcacatgccatttctgttgccgtggccagatggacatgatccactgatgaaaacccacatgtgtgtgcacacatcttccacactcacacacccctgcatttgaggcagagataccatgcagggctcttcccaggaaaccagcagctgatgacagagtttcttagaggatgaagttgtacattgatggacacaatgttttcttaataactatgcatttcataatgattattagaataagtgtaactagtacatcaaacccagatttcacagataatatgactgatcttccatcaatagcaatgacatgcagttttctctgaaaatagattgaagtaaacaaaatgagtcagctcaaaggaaaatatttagtaaatcgtaggactgcagtacttggcaatggcaaaaaccctgaggtggtctgtgggtgaatgaagttgggggcaccatggctgccagggtatgatgggtaggagatggggaaatgtgggtagagaggaaacctgaggccggttcccaggggaacttggagcttcaaagaagggaaatcttgtgttctggctggtagacagaaggaaaaaaaatccaagcctgtttcgccatcagtaattgtgtgtggaatagactgtgtgtgatgttgagggaattcaacatacaggaacgatccctccgggaagatttaaacacatcttctttgaagacgtgaatataaaaacaggacccattcttgctatgatcaaatactcttctagggctttttttcacttaaaaatactttttagtatgaaaaatttcaaacaagtacaagtagagagaattgcatgaagaattccatatacccatttccagcttttccctgatcatttttaatcctctgaaagaaggacaatctaaccgggagttgggaaaagcaagtgctagtttggctttgccacaaattggctgtgtgaccttgggcaagtcacttgacctctctgggcctctgttttccctttttcaatcctgggatgaattcaatctcccagaaaccccttgtcccccagcccgcttctatatgctcatgagatagcaacaaatgcacatcgctaggctaactgtggtgctgagggaattaaactgataaggttttctattctttcattctttgcataacctttcctatggagacagcctaaggaagtgtagggacatgctaagtgatcctgttagattagatgaggtcaaatacttcaagatatgtccccatctgaaacactttgcattggcagtatttggagacaactgtgtatttgcctgctatttacattggaaaggcaggttaggtgatcatccattgactggagaaaaccatgtagacaaccggactggaaaatgaggcctctaggaagtgcgtgaaatcctgatttacatcatttggtgatctttttggtcgaattaatcagatcactgtttacgtgagccaacacataaaatgcttagcaaagtgcctagaataatatgcattagatataactttcatgatttctattttccatgcagatgtttgactaaaatgtttacgcagacacaaagctcacacacaatcagctttggtaacaaaggcaggataatctactttaccacgagaatctatgctcccactcagcagctgtcattccctaagagtggcttgtcctggccacaccttgccccaccacgagacccttggctcttagaggatccttgcatatagggtcttgtgctttcaacacacagccttcagcattgaggacaaggcgtggtctgaccactaaccctgcctttttcactcgttcagcatctctgctcaggcgagaatgcagaggaatgaaactccccacgcacctgttaaaacaaggtggcacatgttgggagtaagaggaacaggatagggagtgagtagctctgagttctgctcttgggtctgccactgtgtgatcttgggtaagaccctcctctcagcactcttggtctcatccacataacaaaagcgttaaactgggtcacgtgggggtgtttttagcattaacatagtctattctgtaataacgatcacataataattatactaatatagatcataacatcatcattataactgtatgacaaccatcacatgcattataaagactccctagtggccatggctcctgggactgctcatcatagttctagttactccttaaacacattttcacagggacatggctgctgtctttgagaaactcataatggaatggaagagatgaggaaaagatcaattaaagtgcagtaggagctattacggaaataggaacaggtgcttggggagtccagaggaggctgctaggatcctaaaggggctggaatttcagctcatctttgggttaaacatctgctctcccatcttgagtcaatatggaattttcattcattcaacagctgtttgctgagcatccactgagccccgggcactgtgctggctgtctatgagggctgagcacacaaagtccatggcctgttggaattactgactatgaagaggcagacaatgcacaaataaactaaaatgtgggttgcaaattctgtacagagctatgaaggaagctcaggaatgatgttcaggaatgacaggaactgatatgccttagagatctgggggtcctccttgaggcagtggctgctgagctggggtcctctatgtgaggagctggaagagcatcagagggtaacatgaaaaaaggggcaaagagcctggtgggctcctcaagaaactgggaggaggtcaagtgccaggagcactgagagtgagagatgaggccataggctaaggcagatgccagagtgtgcaggccccataaggggtttgggaggaagcactaatggaggaaggcagagagtgaactgatttaccaattttaaaagcactctgggccaggcacaatagttcatgtctgtaatcccagcactttgggaggccaagacaggagaattgcttgaggccaggagttcaactgtctgggcaacatagtgagaccctccctacctctacttaaaaaaaaaaaaaagtcactgtggattcctggtagaagatgaaacacaggaaaccctgtgaatttagaaatgctggtttggaggtgtaccatccaggcaagaagtcaagtagcagtcatgatggagctaggtctgtgggttcagaatagatattgatggtggagttggcctaattggctgggggataagatgtggtggtggggggaagggagagggagaaataaagagcgactcccaggttcctggctcaaggtatggggcagatggagttgctgtttgcagagagggcgcaggcagggagagaaacagaacacttctgggatgacaggcttccctaaggatgaaacgccatgtgtaaagagcgcctaacacactgtgctctccataaatgctgaccccttcatccccttcttgtatttaaaacgaacttcagtgcagtagggcaactttaataaagcccaggtaggcctggcagccagatcagtagaaagaatggggtcggggaacttctgggcaaataggcgctgtgccagagagccttgcaagggcgcggcggggttcacccctgctcaggaggaaataaggaatccctcctgagctaagtgcaagtgaattcagccagcaaggctgataaaaacaattgcctaaatgagcaagtgcatagtgccttactgtttacaaagcacttttgacatacgttatcccatttgattcctatagtcacatagaagcagagccataatcccaatttcagggagagggaagctcaggcttagagtgcattagggacttgctcaagctcacacagtgagtcggtggttgcccccagcctttctgattctcattgagggttccccagcacagccagtttgtccatcagccaccactgacaaaggccctaggacctaggaggtttttaagagccaacaacaagaagaaaattggatttgaaaaaagatgtagttagctccaaaatacaaaaagaaaagggcaggaatgaaatgaataaatgtttatctacatttccaccacatgtcaacttcttgccatagcaccttcattcattgttcgatagagcgtttattaaggtttcattacatttgaaaataatgtgtgagccacattctcctcactttgcaagaattccagagtacatggggtgggtgttcagaaatcatagccagtggtgagttaggtggtgagccaatttctagtcaaataaccgcaaaggcaggattttaaaatcctttcaaagtattttacaacaaaaaattatatatttcgtgaaataagttctttttagtgtgtttgatacaaagtgaggtgtggtttcaaatacaaatgttgagggcctgagagatcttaggtgtccatctggcagctcttcagctctccttcggatctcttttctaagtttatttggttttcatgaaactttgtgaatccaaaaagaaaaaaaaagaaaaccacctaaaatcgtctctagttttgaacctaccagtatttttggaggaagcgtttccagggaacagagacaatggacaaagagaacaaggtagctttcagaaaatcaaggtagagagagtctacccgtgtctactctcagccaggaggccagtagagaactgacccagcagaaggagcttcctggagcaggagtcagttggctaagccaagagtaggttcctcagtggttgtgtaaggacaggagggcgagtcttccctaagaacaaaggcgggtaagttttggttttatagctcatgcatgcactcatttttctgagcatctcctctgtgccaggtgctgctttaggtacttggaataaatcagtgggcacaagagacagaggtctttgtgtctcagggagcttagactctgaagtatatgtgtatgtacgggacagccagaaaacaatgaacataataaaacagaatatatttgatatatattcgaacacaatatagcatgttcgaaggtgatagaagactatgaaatagcagaggtagatgagtagaatggggatgccaggggaagagggggtgtggtttgcagctgaaactgggttggtcatgcttggtctcactgagaaggtgagattggacttgactctcaactttcaagactgcaaagtggtgaaggagagaaccttgtggctatctcacgaaagaacattccaggcagagggaccagcaaatgcaaaggccctgaggtaggtgtacgcctggcctgttcaaggaacagtgagaaggccagtgtaggtggagtggctgagtacgtgatagtgaaatagatcagggtagtaatgtgggcaagagcatttagccactgagatgcctgcagcttttcgttgaatgagagaggcagccactgggtgtttttgaacaaatgattaatgtgatcttatggatgtttaaaataatgcagtaagactagactgtaggggagtgcattagtttcctgtggctgctgtaacaaattactataaactggatggctgaaaacaacaggaatttattctctcaaagttctagaggccacagatccagaatttgtttcactgagctggaaccattgtgtcagcaggtccacacaccctctggaggctccaaaggagaatctgttccttgcctcttccagcctccggtggctccagcattcttggcttgaggccacatcactctcatcaatctctatctccgtggtcacattctcctcctctctgtatgtgtcagttccccctctgctgctgatagaaacattcatggtgatatttagggcctacctggataatcctacatggtttgtccatctcaagttccttgacttaatcattcctgcaaagagtctttttttccaagcaaggcaacatttacagcttcctggggttggtacttggtatttttggggtccatgacccagcctcctacaggagaaagggtagatgtagaaagtcctgctagggggcttctggagtcatccaggtaatgcatagtgatggtttagatgggatgggaacagtgcaggctgtgagacatggctggtttctcaacatatttgaaaggtaaggccaataggattttctgacagactggaggtggggtgagagagaaagagaagggtgaagactggccacaagatttttcacttgaacaactggaaggatgaaggtgtcctcaccgagatacagaagactgtgggtggaataggtttcgggagtaagaacaggagctcagttttagaaatgggggcgtggtgagatgtctaaacatccacatggagatgttgagtaggtagctggggagaagagcccagggtttgggaggaaaggctgggctggagattttaatagtggagcataggcatggagacagtacttacagccatgggactggaggagatgagcaagggagcgagggtagagaaagaagggaactgaggactgagtcctgaggtcctccgacactaggaggttggggagaagaggagtctccgcaggagtgagccctgagacaaaagaaggaccaggacagggtcctgtctaggaatccaagtgaataaacacgtcagtggtgggaggtataacatggccttcacgccaagaccgaaatctcagccagggctgcagccctgccttctaactatccttccctctgggcacatgtggcaggtgtctgctcactctggaggcctcttggagctcccaggccccaaagcataactttttgcagcggttgcataaaccttagttccaccaaaggcagggcgggtggggaaaccattcactctgtaggttggggaagctgctgaacacctctcaggattcatgtgccataggcttgggacttactggcctgttagctagggagttgggatcatggtgggaggagaaggtggtccctgaaaagtgagtggggccaatcccaaaggtatggggtctgacttcacaggccaggagatcaggaaacaaagagggcattgggaatcagggattcttggggccagacacttctagggagtaatcctgcttctgacagttctatctgtgtcgatcttaggcaaactgattctctctaagcctcagtttccttatttgtaaaatggggctataaatacttgcttcctaggaaagtaatactatactgtgtttaagctaccaggcacatcataggtgctcaagaattttggtcattttccttgtgttgatttgaaactatttgagttagtcctgacataacactcacccaaagggagatgtccctttttcgaggagctggggtgtgggtggccagcccgtggccctggaggccacagccgggagcctgctcctagtgtggggccatagcccagcccagcacttcgctaccatcttgtaaatgtgtgcccagcagggccagggaagatcatgccaccagctcccagaaaacattacctgtacactcaaaaaatgtcctctgagtagaacaagaagaggccttggctgcgagttctgcccccagtcctgccgcgcttatcccatgcgccatgttctcgggcaagtcactgctcccctataagctttattaattcaatttgtaagatgagtggtttgaaccacattggtcatttccatatttttgttttataggaaaacattcttattaaacagaaaagccttgcatagaaccccagtgttttaaacaaatgaaagatgccctggttacagtgcggaggggagtcctgggcactgaggcttccttatctcccccaagggagcccagggaccctctatggaaccctacaactctaaggaacaggcttagaaaaattctgactaaaggcaaaaattgtgcctctgagtttaaagctatatgtaatcggcattagatggcttgatgctgatgaatatgtatttcaaacagttatgtgcaaaaacatatttatgtgtatactttatttccattttaaacctgcagatagcaggccaaattcttaatgttttatgcctacttgttactttcctgatgtcaaattcgctgcatagttatattcaaagaaggaattgacttagtatttgtagtaaattaaaactgctttgactatcagagagagacagacagatcctgggctaaatatttctaagttctctcacagctcagaaaaatctcaaaattataactttttcttgcagttgatctctacagtttcatgaagtgggttctaggttaccacaaaattaagacacatgttgttgttcaatagggcaggaaagagtgaaaaccagctttagttgaacacctattacggatcagctaccatcttatcttatttatttatttttgagacagggtcttgtactgtcacataggctggagtgcagtggcacaatcatagctcactgcaacctcgaacccctaggctcaagttatcctcccacctcagcctcccaagtaactgagactacaggtgtatgccaccatgctcgtctaattttttatttttgtggaaacagggtcttgctatgtggactaggctgatcttgaactcctggcctcaagtcatcctaccgctgtgggctcctaaagtgcggggattacaagcatgagccaccacactggcctcaggtaccatcttacagtttattttagttaacttttagaccaatgtaatgaaggtgcaagtaccaatttttcccactttgcatatggggaaactgaggctcagagaggttaaagtggcctactcaatgtcatacagctaataagatgatagtttcaggattcaaactcagatctgtattcaaagactgtgctcttcccaccccaagttgtttctaaaggcaaaaaatccctttgatttcaggagacagtccttgaattgtactaagaatgatcccttgtattgattggtaagttcttggtttagctccagctttcccatctacattactcatgctgctctcccatgaaccctgtgaggtaagcaggccaggtactatcatgtccgtttttcagataggagaattgaggtttggagagatggagtgacttgcctaaggttgtgcagagcatgaagaactggggtcttgctattccctcctgaatcttctcccaatcaagagtgtgagccatataccataaggctatcttgctcagatagttcatgtcccaccctctttaggagaactcatttcattttcaaactgcaccgagttctttcatcattgcagctttttcatttattaggcgttcaatttcccttacattcatcatttatttgctgctgcttttcattttttaagaggtgaaggaaatgcaaattagcaaatgaatgtcatgcataatacagccggccctgctacaaacagcttttgttagagtccgctctgttctaggacaaattggtctacaaggacccgatacacctctctggatgtgttgacacagacgcagcctgccaggaaaggacaatggcaaaagcgtgcttttgtttggtctgccattcccggggttaatatgttgggtaatatcttcagcattgtttccccgagccataggaaggtgtgtgcccagccctgcgatgggtgcacagatgctccagtgctgttcacgtagtgcaacttggtgcagccccctcattcttggccttagttcttgaactacctgatctcgtgtgtcccttgcacttgactctatttcttggcaattcttgctggagttctgccactcacccttctcttacgcctttgcccagcatctttggcttattatgtgttctcttcccctcatccaagaacttggcttttcattgggctatggccacatctctccattttaacaacatactcgcagactgccttggcctcttagatttatggagtactgtcctatcctctatcctatgcctctatcaggtctgatttgttcttgtgggtagaacccagatccacctggattcccagggatgaaatgttttaatacatgagcttaacatttgtatgttaagctccaatcgaaataacatttgccattcattgcatgctggacaccgtgttaatgcctttgtttgctaggtatcatctcagtcagtactcacatccctataagatagttatcacagtagtcccactttgtagatgaagaaacagagaaggtatacaacttcccaagatcacacagctcgcaggagacagagctggagttcaaatgcaggtccacatagtgttttcagctatgtgcaacactgccttccagccagtatgaacagcttcaggagctcaagaccaaacagatatattactgactatggttttgagctagattttagtcatgagtgtacacaaacacaatcatgtgtgcatgcacgtatatgcacaccatgcctcatttgtctcgctgggagttataggagctagaccagagctgaaaatgaaaaattactgctaggtcagtattattaatgcttcatggaaaacattccacttccaaacaattaggtagacagattttcttgcatttcttttctttttcctacttattactacagatgtttacaagaagaaacaaaggtttctgcctctgcagcattgactagcatttgctggcagataggatcctctttggatggcccaggcagccagaggcagaaggaggatttgcaggtatgagtgaccaactaactcctgagactggttttcacgaaaagaagaggaaagtgaggatctgattttaaaaagaggatttttaaaataaaggccatatgcaaggctttgaagagccttggattttccaagtataaaatgtggaagtggcctgatcttggtggatgttccagccccatgatgccgagaccatcagactggggataattaggtgaggaagcaccctccaacccacccaggctctctacaattaaaccatctgttgagttctataattttgtgggttcccaggatcttgtttcctctgaatattttttgttttgtgaactacaggtcacaggggacagctgtagaagagaggaacctatttcttgatgcaagttctccaaaaccatttccatcaattgctaatggtttcattaacatgcactctggggcttggaggtgaagtccaccagctaagaacatcagaactgctaaggaggctcaggcaactattccagaggtggctctgggctgctgaggagagctgggtggatttttaggatgttaaactcaaaaggtcagggaacactggtccaggactttctatcaaacctataatcctctctctacctccagttgtgcctcccctgtccctgtcctcatactgtcaccaatgtgatcatcttaaaatgtatatctcggacatgatcataccatcttggcttcccttcttggatgaaatacttcagttgggacaaaagtgaagttctttaatctggctgaagcctttccaataactatatacctctgctaccccaaaccaataggctagcaccgtcaagcctcatgcaggctttggatgcacccagcttcctcttacccccaggtttttgcccatacagtttttgcccatagcctggtagacctatttcccctcttctccatctagttgacctctattcatccttcagaaggtatcacctccttcatgaagtcttccctgattgtctctcccactttgtaggcatgtaaaacctaacctaacttaaaatttttaaaattaccttcaaacttcatattttaaaaggatatttgatccacaggaataatgcttacattgtaatagtaagtcaagaaagcaggatggaagaaaacatgctaaatatcctcatttttgttaactaatccccacacagacacgtgcatgggtgcacagcaaacagagccaaagaaaatacaccagcatgctaatagtggttaccactggttggggagttctatggaatttttattttcttcttttatgtttacaaattatgtacattttatatgattatctaattaataattagacaaaatgctatttagaaagaaatctttttttttttttttttttttttttgggacagagcctcgctctgtttgttgcccaggctggagtgcagtggcacgatctcggctcactgaaacctccacctcttggattcaagcgattctcctgcctcagcctcccgagtagctgggactacaggtatgcaccaccacacttggctaatttttgtatttttagtactagcagggtttcaccatgttggccaggctggtctcaaacccctgacctcaaatgatccactcacctcggcctcccaaagtgctgggattataggtgtgagccaccatgcctggccagaaagaaagagttgtgctaaatattgtatgtgaatgtaaagaaactggaaaaaaagagagtggttagatctctatctgttgacacgcgataaggtaaaaagtgtaagctttagactaatgcatatagtttctgattaaaaacacacaaacaggtgactatatgcttacatatgtgtgcgtcaacaaggagtatgctgtggaaatgttcgcatcaggctggtaacactggttacatcaagaggaggggggatcggagggacgggggggtggaggagtcagataatttattttgcctttattgatctttgtagtgttttatttcacttcccattgtaagcatgtgccactatggtaaattctcagaaatcaaatagaaaacgaaaggctctaaatagcaggatggactaaggtgtttataattaataatataagatttcaggcatgtcaaaatgttatcctcaaacttgattttctggatgcttcactagagtaacttattaactcttttaatttggaaattatcttaaatttagggaaaagttgcaagaatgctacaaataatgggacaaagaacaccaatataccctctacctaagtcacctcttattaatattttcctccatttgctttattatttgttcttcagcacagtaatgtttaattcacactaggaaaaaaaacgcattacagattcatacatcactatttataccagactaattaccatggatttgagtggtcacttaaaaaaatacttgctatttcttaagctacagatatgctgcatgtgtacaaaaaatcatatagacaagatcgttctttgaaaactgaataccaccaaagggtctggccacagcgattagtaaaatacatgatagtgagcctatataagggcttgttacagagcaatgaaaaaaacaatatggatttgtgtgagatgataagaaataggtttgagatacattaagtaaaagatacagaacaaaatgtgtagaatatgagcccagtgtgcaaagaaaaaaaagatatgctagaaagagacacaagaaatgattggtttacttttaggaagagtgctggggtctttttattatacttcctattatattttttttacactctgcattttttaaaaccatgtgcatgtatgactttcatgataatagagaaatgaattggcataaaaaattttactgtagggccaggcacggtggctcacacctgtgatcccagcactcacacctgtttttccagcactgaggtggtgtatcacctgaggtcaggagttcaagaccagcctggccaacatggcaaaaccccatctctactaaaaatacagaaattagccaggcgtggtggcacgtgcctgtaatcccagctactagggaggctgaggcaggaggatcacttgaacctgggaggcagaggttgcagtgagccaagattgtgccactgcactccagcctgggcaacagagtgagactccatctcaaaaaaaaaattactgtaagagaaaagctgtttaccagttcctgttggttttggaatatgggaggaggccatttcccctccccactgggttcgctgggaggtgatagtcagacttaagcctcctgaggagtcatctccctagcagcagctctccctattccctacagcaggtgcaggtgcagagatggtggactgccaggcccctgggtctaatgtatcccacaaatgtgctacctcccatcccagagtgctctgaaatttgtgtcaacattgaaaaaaatggagtgattttacataacaaattcagattcccagcctatctgcagaaatctggcaaaaccagggctgcgtttgtaagcacaaccgtgggcagcagccaggtatgggctgcctttagcaagtgaggaggcctcactgaccaggtgccctcctttacaaagcccattagaaattgactcccctgctccgatgtctcatgggtgaggccctgccccgctgatggaagggagatttgaacatctctccattgctgtctctcaatcaagcaatattttctactggaggctgtccaagcatattctaagaaattccacagtgagaggagggttgttatttcacacttttagtatataggcgaagtggctgtggctcagaaaagtgaggtaacttatctaaggtcacacagcatgttagtttcaggggcaggacaagagcccagagtggcaaactcccacccctgtgcacgttcttctgccttatgtggccttccacaggctagctcccagattggatgatggctgagagttgagggctgggctctccatgcacacaacctagcccttccttctcaggtaccatctcctgagcaaggcaggtgtgtggtatcaaggtcctgtgacattcagagaacacaggtacaacagcaatgacaaccacatcttccttcacagcactcatgtcccaagaggcaggataggctagaggctgagagtgtagcttagaactgtggctttagtacttcctagctgggtaaccttaggtaagttatttgtctctctgttcttatgtttccttgcttgctaggtggagattacattataatattagcttctacctgataggattgttttcagcattaactacattagtgtgtgcaaggtgcttaaatcatgcctggcacgttgtaagtgcttgataaacaagttatatgattttttatgtgacaggaaccatgctgagtattttgcatgctttatcttagtcttcccaactgtaatcaggtaggtgtcattcacgtgcattcattaattcatgggattcacagcattcattacgtgaattcattaatctactcgttcacagcatcattaattcaacggatctttaggagtatctagttacactgggtgctgcccttgacgttggggatatggggtcaagaatgcagaaagcttacatttctgcctttatgaagcttacattctactgagggctgggtggacacagacattaatccatcagttaatcaagagtcaggagtgatccatgctgtggagcaaaataacacagggtaagggacagagaaggaggatgggtagggagttgagtgagtaatttggtgccatgaggtaagggaaggctgctcccaggaagtgcactggagcagagatctaaatgaagtgagggagcgaggaggcagatgaacacaggaggagtattcctggcagaaggaaggaaaagtacagcggccctgaggtggtagtagaggtgagtttgttgcctagaatgtttgtggaacacagaggaggtcttagtggctgcaaccatgagcaagagggagtagagcccagacgtgggtcagggaggaagccagaagtcaagacatatacaatgttctctgatttgtagaagaagaaactaaagctcagtgaagttaaataacttcccagaagtggcccagctggtaagtggtagaacaagggatttgaacccaagaccatctggcttcaaggcatatgctcctaaccactaggatacattgctatgaacatgcacagtggaggccgggacatgcacatatagctatcccaggtggtcctgctccaaactgtctgctgggaaattagacaaagagtaaggagtaaggcatagtgagagagcgagggtgtgtgtggggtgaggagtggggaagagcagaaaggaaggggttccttttgtcctggcatactcatatttgccttagcaggttgaggcagccattccgggtaatggtgagggctcagggttgatatgaaaagtggcatttgtctaaaacttgtcagttcttggggcatctcggaacggacagttttgaaacaccaaaggcactttaaaaaataaaaatagcacatttctaaatgcaacatcctctttggtaatgatataatgatatattaggcctccatcgctggtggcattatcttgtacagcaatatattgcactgttacaattcacgccatcagtctgcaaaaccagggtcataaaaccctgtaatttataacagaatcttgtaaacctatgtattatacatgtgtagatatcattgcctggcattccacatgcagtaactacttggttcagaagtcagggccaaagcacctcccaccgcccattcctcaaatgtagggctcaccagacaaggtgtgcatatcattgccaggccccctttactgagcagtaaattaagcaacaggctgtgtcttggtggtagaggaaaacaaagataccaaaacagcaagatgtgatgcaaagaggagagagtgacagcctgaagacttggtcatttattttatgatgctccttgttcgtatgatcacacgatccctagtaggtgtcatgcacccagctgggaatagggatggaagtaagacgcaatcctccttctggtctcatgtttcttaaaccttagtgtgtattcacatcacctgggaatactgttggctcacagatgctgggctctaacccgagaatgctctggtttgtgggtctggagcctgagactttgcatgtctaatgagttcccaggggatgctgatgctgctggtcctggggccccgctttgagtcattctgctccaagtgactttgggacgctctatattaaagatgctgagggatattggctgagtgcggtggtgcacgctggcagtcccagctacttgggaagctgaggtaggaggattgcttgagcccagggagttcaaagctgcagtgagctatgatcataccaccgcactccagcctgggcagcaaagtgagaccctgcctctaaaaaagaaaaatgcagagggagaaatgagctgccccagtgaacacaggcaggggcagatctgtggataaagcctggcctcctggcccctgaatccaggactcttccactgggccacactgcccatttcctggctttgtctccaaatgctctccaaccacaaaagtagcaacagggagaggggtgccagaaagatggcaaccagacgcatgcagctcacagcagaatctgcgggcacattaactctgcaggggccagttggagcactcagcagaggccactctgagcttcctagggctcccccaaaggtcagacagaatcatctaatagcttcttgaagggaaaatgatggtctggtggtttttttccctgctgaacctcatcacctccaacggccacactatggatcgctgccgccaggggggcggggaatacgaggtctttgctgtattgcaaggcagaacgctttttctcgagaggtcttaatgacttatgggatgaaaggtggcaagtggggatgccatgcccggctgaaccctgcaggccagagatgccgtgatagtcacctctctccaacccagtgctggggccccatgcctgcttccttgggacagcccccgtcccttcccaggggtgaccttctcaccaccaccccttgctgactggctcctcacaccgtgcaggtgcagccccagtgcgtctgcatgtaaatgagcttgggccgaccaaacgctggcctcctgctgccacgtagcatgattgcagacattttattgccaggtgattgctcttcgataggaaccacctcttcagaacccttttaagcctctccaacaaacattctgatttcattccttattgccctaatccagctgcagacccttgcgctcctgatttgactgcagacttagaaataaatatcccagtgtgcctgtcctaaccaaaggactattgatagcaagtagcaaatccatttgccacccaaatagtatcctggtttgccatcagtaatttcagaaatgtgattcccagcattatgccctctccaaactagctttttgcctcttatttcctagcttagttatcagaatttccacctacgctcttgagcaagatgggacactcacaataaacactgtctcccatcttcccctcatcacccactcacaacatcattaattctaatcctcctgttgtttgtggattagaaaacagctgttttctgagctgctatgtgtccctggtgctaggtgctgggtccttgtcctcatggagcttccagggaaataggggaaactgcaaggaagcacggaactatgctttgtcatgggcctctggtgacctggagaaagtcaattaacttttgatgagtgacatgtctggtttctatccccaaggagttcatgtgagaaggggagacagtcacacaaccagttctttgcagtaatcataacagctgagaggcacacaacactgatggtgtctaagagctgtatatatgccagcttatttaggactcataactgtccttggaggcaaatactatgattatatgagccacacaacagaggaggaaactgaggcacagataagtgacttgcaagcagtcagctgggatttgaactcagaaagtctgctccagaatccatgctttcaaccctggaatcctagtcacgacgaggtgaacgtggggggtgctggctgccttcactccagaggcgtctcctatcccagaggaggccagctggcctgcctggtccctcttggcctccatctgggtgccgtggcctcttgctgtcactgaagtgtgtgactaccagggccagaagatgcttctgtagggcttggggcccgctccagggcagcatctggagacaggagtaatgaagggtagctggcgcacgaccgggttgtcaggctggggactgaagggtgcttcctttgaacagtctgtgctcggcgccatgtaggctccactgagccatgaaaatgtctggccctcccagtgctgcttcaaaagactgcccggatgaccacctgtccctggaaacaggcttaccaaaactcacctgcttgcttcaaaattcaccacccctccatacccccaaggatctctttccctttctttctctaattttcctatgcacaggagggagagaaaatagggaagggaatggggagagggagaaagggagggagggggagaaaaggaggaagagggagggagggagagagggagggaagaagaaaggaagaaaggagggaggaagagaaggagggaaggagaggaggaagggagggaggaagggaaggagggaggcaaggtatggaagggagggaaaaggaagggaaggatgaatatatagtctgtaattgctcaaatgcctatagtatgtttctctcagactgttattccaagcccactgtattctgggccccaagcactttccaaacttacctatcaaaatatcccaaagggtcattcacacataatctatgtgtccaataagggacagatactctgctagactgtggttaaaccttgttgagtgtgacagatggttcttatcctcttagggctgatcatcattaaactaataaataacgcaaataaacatgtaatcacacattgtgctgagtgctataagggaaaagaataaagtactatgagagggaaaaggagggtcagaatggggtgaacattcccaagccacaagagaaagcctcgcccatgtgtagatgaggaatgttgaagtgagggcttaaggctgccgtggaatgaggggtagacatgccacgtctcagccaggcaggtggtgcccagggctaatgcaaaaagatgcgagaagacttgaaagaaattcatggatgtttgctccgtaaatgagctctttagaggaatgtaatgaatgctgcttcattcattaactggactgtgagctccctgagggaagggcatctgtttgttatccatctgggcattttccggccctagctgagagcttagtattaatttatttatatgtacaccgcctggttgcataaagacaagccggggacctctacagtggcagatgctggaggaactgtgtttatgctacatgattcacccgctgtctctctaagctgtgaggacaatgcatctcagaaaggaccactatctgctcactctcaccatgggctgtggctcctggctgtgagtccacgggcctattgcaggctgcaattgtgggttttttatgttttgattagtaaaccaagcttttctccctagaaaatgttgggcataaattctcaatgtgaaattgacaaaagcagagatgctagctggtgctgagcaggggaggaggcgctggagccccatccatatatagcagctgctcctcccactaggtgcttctgacaaaccctgactttgaccttctctggagatggggcctcccctctgcggccccatgaagactgctgtgcttgctcctgctctgcctgggctctggccttcagtgaaggccatttcagaatgaagagttggtgttctgcagcaggaggaagtgtgccttcattacccagcctaggcgtgtctgggctgcacagatctgggcatatgaaaggggggcccacccgctgcagagcttggtctttccccattctgcttacaagaagaattcctaaagcatggtgcccggttcctctccatgctccccttctgcgcgggacagagggtggagcctcgtgagtctcacatgataccggctaagtatcaataggtccccaagtcgcagggctgggagcctgggaatagatgagtggtggtaagtggaggggagggcaagagctttgggctggcatctcagtctgcctcctgccagctgtgtgaccttggacaagtgactgaatcaacctgggccggcctttctgcatctataaagcccacctcacaacgttatcgtgatggttgagtgacacaatgtgagtgcaatcaatctgcagaggcacaaggtatatgccaggcagcatgacatctgccaaacactttacaagccgtgatgtcactaccacacacagatgtagagaagcgcccaggatggtgcctagcacattgtgggcacttccatggcagctcttacagggcctagagatgaatgctatggccccactcagagccatgaatcaagcactcactatgtgcatggcatgactgcaagtgctttgcatggattgcctcagtgaatccttacaataatcttgtggagcaagtatgactattctcattttacagatgagaaaaccaagacacagagaggtgaagcaaattgcccagagtcacacagctagtaaacagtggcacagggaatgaaatgcaagctgcctaactcctttcctgtgatcagaaccactgcatcccataccaggccacgtgcatctctcacaatgtaaagtaagggcggcagctgaatttctctcatctcactcctgatgaagaactgtttcccagaacaatgtcagatcaagagccaagcgatcagtgctttggtccccctgtttccacctgaaagctctgtgggttgggctaactcagttcccttctctgggcttgggtttccccaactctaagactgttggcaggggtgagggtgctgatagcatgaaatctggttcatcctggctttagggtgtgagtctagggttcaaacagttacagggaaggacaatagttgggaaaaagtatgaactgaatcagaaccacatgtgttgggggaaaacaaatatttctggcccagctggatgtaaactctgccagagcctagcatcagcctagctaagaacagttaaggggctttgcccctgattatgtggctgtggccaccttcactggaggagaataaagaaggagctaaaggtgaagaaccatatgctgtgtggccttcactgagtttcttggcctctctgggtcacatgactccagttccaatacactccctgtaattcccagatgggccattttcttacagggctcctttgcctaggctgttttcactgcctggaatgttctcttctgcatcaccttatctgcctcaagatttagtgtggggcaatagcaaaggcatggaatcaacccaaatgaccatcagtgatagactggataaagaaaatgtggtacatatacaccatggaatactatgtagccataaaaaggaaagagatcatgtcctttacatggacatggatggagctggaagccataatcctcagcaaactaacataggaacaggaaaccaaacaccgccatgtcctcacttacaagtgggagctgaacaatgagaacacatggacacaaagaggggaacaacacacactggggcctgttgggggagtggtgggagggagagcatcaggataaatagctaatgcatgtggggcttaatacctaggtgacgggttgataggtgcagcaaaccaccgtggcacatatttacctatgtaagaaacctgcacgtcctgcacatgaaccctggaatgtaaaataaaataaaattaaatgaaagaaaaagattcagtgtgggggccagctctcctagaaagccttcttggattgggtgtcttcgctctggctctcccagtcctgggcttccttctacccagggtatttttcactagatggccattgtctattcattgttttgtcttcctcatgtggcagggaagatctctatgttcaaagtatattgaccctcttctcaacctcatcttgagtttctcataacatggaaactgaaatccaaactcctgaccctggcctgtgaagcccacctgagctggccccactcctcagttcacctcctgtcccatggccatggtggtcttgctgctccttgaacacgtccagttccttcccacccagagccttttcactaactgtcctcactgccagagtgttctcccgggaaacttttcctgtttgacaccttgccattcagaccccacaatgctattctccagagacacctaccttgaccacaaaacttaacacagtcactcaatcacccttctgctacaacccctgtttgagttctgtatacaacacacatgtgtttttatcctccccccatccagaacataaaccccagggggcagcaactgctgtgacgatcttcttccctgccatatccacagcaccaagagcaatgcctgactcagggaaggcattcaataaatatctgcctgatgaaagaatgaaaatgaagttccattttggcacaaactatttgtgatgaatgaaaaacaacagattcccagtttttcatttgggtcaaaaagaatgtctgcccctgcatttagtttaaaaaagcaaaagagagtagaaaatcttttttcttcttcttcaggagctaccttcccatccccaccccccacccccagttgcagcacatgtggcagaccctgctgtccagtagtctgagctgtgacctagctttgaactagtcccccatccgcacaaccgtggctgcccccttacacgtgcatccccgacgtttggaaccagacactaagtggatgatcgctatgattaagctgccttttaattattcaatgagatgtcaatggtgcatgccattgtgacattataatggactacaactccctcgcagatgtcaagaaaggcagggggccattaccttgtcaaaatgttggctccctgtgactttatttccagtacaccaactaatttttcatgtagcacagaacagcagagtgaggtggggtgcttgacaagggaaactgcttggagcgattcgggtgacacaacgatttggttgattctgtattaactcaacaaattctccactttttgaaattcactgactctcaaaattaatgaaattttaggggtaatcagttgacatttcttggctgttcactgggcagaggactttaacatgggtagaagtttggttaaggatggggcaggaacaagaaaaagaacatactggtgacatcctggcaggcctttgtttcattaaacaaccactgactgcactcacacacatgcccacataaacacacatgcatgcacacactcacatgcaccccttaccccccccaggaagcaaggagtgttggtttccattgggaatagtaagagatggctttctaaagttgtctttaactagttgtgcaactttgaataagtcagccctttgggttccagttgattcacctcttaaagaatgctaggcttgaatcatttctaaggtatgatgatacagctgatgactgaatctgatataatctgactgtattagactgatgacggtaatgattcatgccacacactctcgaggatcattaattgccttgcattcatcagtcactgactctgaacccaacactgtgctaggacagaagctaagtttgacaagttttctgccttcgggaaacttacagcagagcccaaaccccaaaggtgaagcagtaaacaggctgcagttaagaataattctggcattgtgctgatggcaagggcaactggagttcagggaaaggagagatgagcgtgggcttggaaagctgcacaggcatcttgcaggaggtaggaagtgatggtgctccggggagggacaggatacccagaagtggaggggacgggagagtgtggggtgagtagcacatgagggaggtggcaaggggcaaatgaagacacaatccctggtgtttccttgagggaactgaagattacccattccctctgatgtgggtggtggttgggttctgagcacctagcagctattctctcttcttttggtcacaagatcttaatttcttttgggaaattatcggttcctcaccgtgcatgcgtaaagggcttatgaatcaagggacatgtgacccaagatatatcgacaaaggactttgacttttgaaggcagttggtcctgtgcatgataaatgcctggtgttcattcattccagggacagcgccctgacctgacagaggagtgattattgcccctgtatatcatttcctgcttttttcagtctcattttccagcctttctattgattctatgagcaatctgatgtctttccaatataatcccttttgcttattttagccaagatcagcttctattgtttacaaccagcaaaccctaactgatatccacccatcatttatccacccatcatccatccatctttccatcatccatccatccatccatccatccatccatccatccatccatccatccatctatacatttatccattcatctattcactcatccatccattccccagtctactagagtattgaggagcagtaggaaataagtaaggacaatcaaaatacacaaagttaaatggaacttcaaaagccaggatttggagttaaaaaattaactctataacaataagaaatttagtgctaagtaacacaacacaggtgttccagtagataaagaagtcatcaaggtcaactgggacttgagtgggcactttggaggggatttttttaagagcaaagtttgaaggacactaacacatatagagcacctaccaccgtcccaagcacttttaccagagacatctgcctcatttccccaccatcctacaaagtagatgtccatgattccattttgtggatggggaaactgaagctcagaaagtttatgccgcttcacctagttcacatctactaaatgacaggacagagattcagaatcaggtcttaccacccccaacacacttgctctttcctccagcccacacttcctaacgcaaatacattgtgtgaccttgggcaagtcaacacccctccttgggacttcatttccatctttacagaaggagggggttggatgagacaggtgcattctagcactacatttaatgagcatatgaacaggtgtgacgttgatatgtctttcttctgtgcctgcaggaagtgcattgtgaggagtgccctaaaagaactatcctgggtacttgctttcctggggccccatattaccccagattcagaccagtttttgtgtttaatttttgacttgagattcttatgccacatgggtagagtaataaatccagatcctacactcacacatgatggaggcttgcagactttagttattgtgggagatttgtctccctgaccccccgacctagaacccctgggagacacctagcttccttgggcttctggatggagttttctactcttaacagaaatgatgtatcaagtggtgtcccatcggggggaaacacagaaatgacacccccatcaatagtcctttatgcaaggaccctctcttggggcttcaggtgatcatcaccctcctccatcccccaaacacaccagcctcctggcctggagcctaggacctggtcccacaggcccccaggaagccagctgtgtattgaacaccatggtttttaaggtctttcattgtttctggaacctaagggctccttcccttccttccttccttccttccttccttccttccttccttccttccttccttccttccttccctccctccctcctgcctgcctgcctgcctgcctgcctttcctcccttcctccctccctccttccttccttccttctttccttccttccttccttccttctttcctttttctagtttgtgcatttaaaaacactaggaatggtagtaaaactagtttctgtgtttggtcagcttagatcacctcattgcttaaagttcaatcacttctttagggagagcagaggaatagttccgtatctgagcccactgcctccagccatgtgcttggtcccagcaggctctgtgggccagcccagatgcctctctgctccatccatgcaagacttctcttcagttgaatgagggaagcctcctgggccccttcacttagcattcactctaactagacactaatctcatttataacttttactgtctacaatgagcgatttttttgaatcaataaactaattcattgcaaagtcaattggttaaaaattaatagcttacctttttctccgaccacccacctagtaaacccccaggttggcaagttatttccattaaaaggaaaaaagcctttaatcatataatcatctttacattttgaaatgataagcctccatactgattatagagctaattatgttataatcagcccatttcctcatcccagtcccctctcacctgagcacagagttccctggcttctctccttgccttggactagacctgcacccccttctatcctctccctgccttgctgccagagtggtctttctgaaatgcaaatttgatactgtcaatccatacaccctgtttaaaattcttctctggtctaccatcatctaaatggagtcccaaatgcatgtgagctgttctgggcctgagaatgggtttcatctagcctgcatggagctttaaacattttaacctaggatgcctctaggctgggtgtgtgtggtccagccggccagtggtgttactgctcctatccacttctacctgtctgtttcttatatcacctgtctgaaccttaaagacaacttcatttctaaccctgacaaaggctggattgcccaaatgaaatcttcccttcctaacctgagcccttctgtagtgtgtcttactgacgatgactctactcacttgaacagtttcaggaagaatacaaacagcttctgtttattgagcacctactctatgccaggcccagtgctaagcactttaaagacaacatcttggataaactgcacaataatgctacgcagaggaggaagctaaggatccaggatgttagagcttggtcaaagtcagaaagccaagaaatggcaccaccaggacctgggtttaagtgcatttggttccaaaacctatgcttccaacctctacactgcacagcctcctgcttctaaacaggggagaagcctgtcctttgttggcagcttgctgttgcacagagctgaccacgccccatttgtacccttctcccttgggtcagtgccctctagatttccctcctacctccttgactgttccctctcaccctcctttgcctgctcctttacttccagacccctaaatgttggcgaatccagggcccagtgctcagcctgctgctcttctctgtcaacacactccacttatgcgatcccacccagtcccactgactaaatgccactattccaccatgacttccaaatcccaatctcctgtcctgacctcctctggagctccaggcttatgtgtccaactacttactaggatacccaatagttacttcagtctcaacagaccccaaacattgaattcgcctcccacctctctcaacacccatatctaatctcccccagccttccattctcaattcatgttaccaggatcagcccaacagctcaggcccacaacctgggagttattcttgagccctgcttttatcaccctctactaccaatccaccatgaagtctcactggacctaccttcaatatatgccaaattggaccatgcttaccacctccatcaccaaaaccctagtccagtccaccagcatctcccatctcaagtattgcatctgcttcctaacttgtcatccagcctccattcttatccacactcatccagtctctgaagtcagaatgatattcttgcagggtatattaactcatggcactctcattcctaagccctccagtggcttctcactgcagtgggagtcatctccaagttcagcccagcctacaagccttggcatttggcctgcacctactatccaacttcagctcataccactgtcttcctcttctactctgctcaagacatacaggccttcattctgttttttgaacaaaccaagttcattctcatctcagagacttggcactgtatctcttctgcccagagcaccttgcctctaggtcttcccttgattgcatccccctatcattttgatcttggctcaaatgccacctgttcatgcagggcttcctgactacatgagctaatgagctaaagcatcttacaaacatccatttccatttctgtctatcctatcatcctattttgttgtcttcagagcactcattatcatctgaaattatggcatttgtttatatgtttaccatctacctttaccatcccattccatcccattgtcttctaaactataagcctcatgaaggcaaggactgtgtctgtgttgtttgtttgctgtagtccaatgctaacaggagctagcacacagtaggcactcaattaactcttactgaataaatgacctaaacctctgagaggtaaactgaattctgaagtagattttaggtgaacagttctttactgagcacctattttttgtacatagagatatacaaggctctgaggaaaatcctcttatcacataaacccatgagccctgccctgcacatggctgtattgtcatcatcatcatcatcaccattcctccatcatcgtcatcgtgagcatcatcaccatcaccaacattgtcatcactatcaccaacattgtcatcactatcatcatccaccatcatcaccatcatcatcattgtcagtagtagcaataatctccaacatgcttatgatgctttacattgaacaaaacaattttttatagattatctctttggtttctcagaacatcccagtgagggaggtttgtcactatttttcaacaactttttacaaatgagaaaactgagccctgggaggagagacacttgcctgagatcattcagctccacgatacccttgcaaagtatctttttcttttgactgaactgcctctctccacgccagcctccttttccacctggagacaggtgatgcaaacagagtccaggactcactcctgtttcaccaacacttagttaagaaattgccccgagtttgtacattttcattctggcaatgtaggagaagagatagcttttaaattgtaatccatggccaaattttatgactgctaagggggaaaaaataaaagcttaaggtgagtttaggaggactttttttggttggttaaagaaaaaaattacaaaattaaaagagtagaaaaaaatagattactagtgactgtttttactgcgtgagcttacaagctggagtggagaattaaaaagttatatagctggggtttctaaccatgacttatcgaagatgaatccttcatatttatagctttttctgtttttcccatctcaagatagtaagcaatcccctgatatagggttgttactctctgcccaggaaccctgggggctgtgtgtactcagcagagctgtcacagctgacaacacaggaaggacctgggagaggggcttgtttattgtccctctgcctggagggatccctctcttgttcactcaacaaccactgaagggggtggaggtggggagtactccttcatgccaggacccagtgaggagaaggaaggccttaaagaaaacagaacaataacagccaaagttccacaccagaagccatcctctcaattcatttcgccctcacaactgcaaataccaccattatccacattttacagatggggaaattgaggcacagaaggattaaacaacttgcccaaggtcacgctcagtgaactgcctctcaagatgccagtccttgaaaagtttaaaaagttggggggccggagaggggcaggaagaagaaagactaaaggcagaatgggagaaatgactgggggagggggaggaaggaaatattagttgagcctctgctttgtgccaggctccacaagttctgcctggtcatcatttttattccttgcaatcactctgtgggaaggcaatgggtggtacttacgtccattttacagataagaaactgaggtgcagaaatgttaatgaactagtcaaagtgagtttggaagtgacattgataggatctgaactgacatctgtctgtttccatttcatactgtctggatggccttgggcaagtgatgtgaccacattgagcatctgttttctcatctatgaaaatggaatagtattctctactctcaggcttatctcaggctctggatgggaaaatgctttgtaaaccaggcagcattgtgaaaccaagtctgctccaacacctacttgcaggtaggcaagggccagctgctttctcattagctggggatgaggaaattgaggcccagggagccaacactgacttgcccatatcacagagctaatacaaaaaaggccagaagtgaagtctcctgtctcctagcgtatagttctccaacattcactggtaagaggaaacttaactggggagagacagtacaaataatccagcaagtacaaataattgatagcaaaaatctaaacatggaaacacatgaccctggacctcaaggtcactgacttgttactttttttgacaacacaggctcctagaatgtccatcctaagaaagactgcatatatcagtgactccagctaaaaaatacccatgcttggtttgaccccaagccagtgaaatcagaatctctgggggttgagcttgggctttagcattaaaaaacaaaatttccccagatgatttctaatgtgcagctagagttgaaaaatcctgacttatgatctcccttattttctggatgggcactagaggcccagagcgggcagctaaagaaacagggttgtccaggaattagtggtagagtgcaactctggtctcctggttcctagcttgggactcttcctccactctcatcactcatcactcggcagttgtggtcaaagtgaccagatgatcctggtgccccctagtacctgaggacagacaccacccctcctcatttctcccactccccatgcctcctcaccagaacctcatgcccctagagagagctcagggtacctgggaggcccaggctgaaaaatgttctgcaagtctgcacctgggctggtctacacactgcaaaatgaagtggtgaactgaggcaattatccaacgtattagcaagcctgtccctgcggcactcctgcgagccaaagtaataaatacaaaatggtaatttctctctggaagcctgatccccgcctcccacacaattcccctcccacccagaagtcatataccacctcctggttgtcctctcctggatggggtggcagtaactgagttatttaaatatctcaggcaaaacctgctttttcgaaaatctgaatcttcgcactataacctcagttctcctctgcagcttacttgtctggccatagcagatccttctagacttcagtggaaagtaataaaaacgcctacaggtatcaattaatgactcccagtggctaacgtcttctttgtgtgtgtcgtaaactagcatcggccctggaaagggagtgggaagagctaggttgtagcttagacccggactcttgctaggtttgtgaccttgagcaagtcactccacttgcctgggatttggaactcttttgttacctttccctagagttgtgcaaatccaaatggagaatggacgtgaaactgcttgcagacttccataaaatctgtctatggaaaagtgaagacttaaactcaggtgcccttacccttacccactccacagtaatctctcagggcatcagtggttgtatgcagcacagggaagaccacggggttgcaggacattccagactgagggaagagcatatggaaaggctgggaagaacatgatagatacagtgaatcccagcagctcgacatggaggaatgcatgtgtgggggtgacagttgagattacctgggtgcttggccttatcttgtaggcagcacggaaccacatgataattttaggcagggaaggttttcaggcaaaagataaatggctggtccagtttttcagcaccagactggagaggccattgaggggtctagtttgttgactggatataggatactatgggagcaggggagattgacttgatgacttggagtatattcactttgattccttagaggctggcacagtgcctggtatatagaaggtactcaataaatgtatgcattagtaaatgaagctgtcaatcactaaataataataaataaatattgtcaatcaataaataaaagagtaagcaaaggaatgaatggctgaaaaaacaaatgagggtatgaatgacttaattgaatgaataagctaaggcatggtttgcaaacagccttagcaattctaactaaaggccttgtagcgacaaaagtgaaagcttctagctgcattacctagaaatgccctgttattggcacggctcccttaattgaagactttctcgctcctaagtagcaatatgctgctcaaagacaaaaactgattactgtgatcaagccagaggctctccttggattctcacctgtcattgtcacatttactgatatccacaaaatcagaaaagggagcagaaatatctagcagctcatcctcgcaggaactaactccttttggaggtatgtgactccgttgccatttctccgttcacatggactccctcaatggcttgtcatttcagtatcatataaagacaaaggaaagagttaacttaatagaaacttaacaattgctgtgctgtctgcacatctaagcagcagcagcctgacggtctagcctgggggaagccgctttgcttctcagagcaggattcaggacaaggtgggctttgaactctgtccaaaggatgatttattgtaacagaataaaatggcagggttgatatgcactcaggtctgtctggggacagaggcccttctttctcttttattccatcctgcttttgcctccagacttgtacatccttgctacatataatgtggtcccatgtacccgtggtattgatgtcatttaggagcttgacaggaatgcagaatctcaggctccacctactaagccagaatccgcatttttgcaatattcccaggtgactctcatgcacataaaagttattgaagtttgagaaattctgtctatagatgacccaggtggcactgtgggccctccaagccaaggattcaattccctgtgaccaggtttcacagtgctctccattgggatcagggaagacttcccctgggaggtgacactgactttgagacttggagaaggacacatatttaaactcccagtggcaattcaccaccatgagtcagggaagttctggaataggagtcagaaccgacctggctttggtaccagctgggtaacctcgggcaagtcaattctcttctctgggccttagctgccccatctgtaaaacaggaacaattcaattggctttactgcaccacatggttatcatgaagataacagacgtgaaagatgtgcaagttctctgcggaacacaatgccagggaaagggcctgtttttgctgtgggcaaccagccatcctgacctaacgttttggaggctgaatgaggaaactctatctgaacatcaaaggcttaagacctttgccctggtgaagattaatcagcagaggaatgtggtgctaattacccagaatggaatactccaaagaaaagggcctggctcagtcagtctcaccgagctgcccttagacagggatatgtgattgggttcctcctgctgcagttttttcccattcacttggagttattttttgaaggaaagttcggcctaaggacctaaagctatgttacattagcattccggaggtcaatatttccagagctgctagaatcaggctgttctttcatactgtgtgggcgagagaggcagccacatcttggaaggagccagatgtacccacagtacaaagaacaagcgaatgagtgactggaattgggttttccagtgtgggaaggaagaagacagatccttccccaactcggggcctttggttggctgttaccctgtttggaatcctttttcggatccctgcatagtttccccctctcatcttcctgatctcagtgaagatgtcacttcctcagagaatcgatcctcccctgctccctggcttcaggcagcccctgctgttccctatcagatgcccttattcattttttttttttttgccttcacagcatttattcatattggaaggagtcttgttcatttatttgttaacttacatattatctgctcctttaccccccaacatacaatgtttttctaaaatccttaatcacctgggggtgtctgttaaaaatagactgacgtaaaatcagttaggcatggtggtgcgtctctgtagtcccagctacttgagaggctgaggcaggaggatcacctgagctgagatcatgcccctgtactccagcctgggtgacagagacagaccctgtatcagaaaaaaaaaaaaaattgatgggcttctcccctataaattctgattcaatagttctggtttggagtgagggattttttaaatcagcccttcccatcgttctgatctttggggagacttggaaagcacagatctggatgagagctctgtgaggggagggtcagctccatttccctctgtatcccatatttcccgggatccctggcctatgatcgtttgccataactctttattgaatgaatgaatgaacgaatgaatgagtccacatatatttttttttttggtggaactatcctttttcctgtttcgacaattcaatattcagacagggaacttgtcacttacaaggcacagcgttaggtgctgggacagctacaggataaagccagacatggcccttgccctcaaggagatgacagctgaggaaggggaacctgactcaatgcacgggattgcaataaaagaccgagaaaggaaagggtcatcagaggggcataaacaaagtgagttttgcgtggttgaaagggtggaaagcatccctttgcctacagatgatttatatggaagagtggcctgagataaccatagaagagatgagatttttagaaacagtatttttcttttgtcttatgcgttgatttgttgtaagttatacacacgtggctaaaaatattcgggtcatagataagggtgaagagtgagaagcagggctccctctctctttctgcaccccatcttccaggcctctcctcagagacagcctgctatcagatctcaggcatccttccaggcatattctgggcatatctaagcacccagttgtctagaatagacagggcatcagaggcagagatggtgaatcagggcatccaggggaaaggaagtaaggacatggaagctggaaaattctttggaatagagataagcagctcaccagtgacttagctttgtgactttgggccatgaactcataaatccaggaggatgggaagagggaggtcggtcaaggtattaggtgctttcctggcttgttggctggttaaaattcttggaacgtggagcacgagagagaggcaatgggagtgaggtagccaggggtcaacataaattaaaaattccagtctggcctggtggctcacacctgcaatcccaacactttgggaggctgaggtgggaggactgcttgagctcaggagttctacacctgcctaggtaacgtagcaagaccccaactctataatttttttaaaattagacagttgtggtggcgtgcattgaatattccaaatgctatattttaagagtgtgagatgcagatcctcatcaccactttttctactaaccttctgagcttcggtttcctcattggtaaaatgggtatagccccagagtgttgtcctgaggattaaagaagataacaaatgggaggcacagagccatgtatatagtagccttcctttatccctctcccgtgtcccacttcctggcaacccattccacctaagttgccagacttgcctttgtagagatctcagctacatcatttattagcaaggccacttttggtgagctgacccctcctcactcctggcacatagcgggtgcctacatgttcctgccccattttcgtctttccccagcatcatagcccacctaagagcgtaggagacattgctcttgctgttccaaagacatggcaaaagatgaaagcccgaaacactcatccccggccggaattataaaaacaaaactacttggatgtgaaaaatgcagtcatgtttccccggctggttaaaatatttgatgctcatagaatattcaacaacaacaaaaaaggctctcactccatgcaccatcaaaaatgtaatgtaattatagtgatgttaaatatccccagctgttctgagatatttgaatcttaaatcaagcctgcctgtatacatcctgcagttgcagctggagatccacaccaagtaccatacaaacatagagctgggaaagttcagacaagaactctgggctagaacctccacatctgtttgttagaggctgggcctgacccccaaaactggtatgaggatcccccaacccgagatgttggcagccatgtgcctcaacagggctatgcaatctgacaggtcataagcatttatccaaatcatctttcaaatccatgtgcagggagcgtaaagagatagtgtaaaataaatggtaataaagtgaatcaacatgcgtctcactccagagcctttgaggtggttctataaatcaaattctttccataattttctctgtgagactgtgctgagaagcagaatcaaacctcatctgctttcctgagcagtagacttagatttatggatgtgagttcacagtggatgcccgtgccatttcaaagtggcaaaataattttcactgggaggggttccaagagaagattaaacccttcactttctaagatcagagtatcaacaactttcagatcagatatgccatcagaatcagatggggatggccagaatacatattttggaagaagagagagtttacagaggaacaaactgatattgctgtgatacaaaagtgtcatctgtaggcttaagaatgaatctccttacagtctatttcaagcttcccagtgacctgcggtgtgaccttgagcaactcaatctccctctctgatttttaattttgatcagagtactgaatggggaagaaacataaaagggctctgacctacccagagaggtgtgatatgaaaatgacataatgtttcttggctagaattgtaacaatatacagaaggccattgaagtctacttttgtacggccttaaaagtctttcttggaagaattgaggggaatcacctattttaatgatgataaggatgatgaagataatagtggtagctcacatttatttaggacctacacacctgtgctgtgcttttacatacaagagagcaggaacagtttctgtatttacactaaacatttatccacaaacactagcctatggctggctctcaataataaagggattaacatatgatttttaagttttgaaacagccctacacgaaaagtatggtctgtgtttcgcaaatgaggaaacaaaagcttatactaaaacatatcttggatttgaactcaagtcctcatgactgcaaatgtgcatgctctttctgtagctacatgaggaaggaatgcattggtgcgaggcagggtgtgtcttaggaagtccagtccaccctcctctttgccttgaatggctgggtgacttaggcctcaggatcctcctctgtaatatgagggcatgaaccaaatgagtctcagtaagggtaagcagctctctaacggccacccagccaacataatacctggcaaagctgggatttgaacttgagtctgtcgactcctgaggcagtctcctttctactccccctaaccacctcctttctaagtttctggagtccaaattcccaatcttgcattatgtaagtgtggttaaaatactcccaagctatttctgaaactagatgcatgtttgttacaaattctttcatttttttgaattttggacagattctgcttcaaaattacccagcctcgttcactaatgtggattcaggtctgtaatagaaagtgttttgtacatcagaaacaaatgaggcctctattaatttccaattcttgctgtaacaaattacacaaaccttaccggcttcaaacaacatacatttattaccttatagttctggaggtcagaagtctgaaatgagtcttaccagctaaaatcaaaggccggcaaggctgtgttctttctggaggctttagggcagaatctgtttccttggcttttccagcatctagaggccatccatcttccctaacttgtgccccctcttccatcttcaaagccatcaatgtaacactttcaaatctctttttctccaactctgtgtgtatgtgtgtgtgtgtgtgtgtgtgcttgtgtgtgtgtgtgtgtgacagatccttgccctgttgtccaggctggagtgtagtggtacaatcttggctcattataacctccgcctcccaggttcaggtgattctcctgcctcagcctccctagtagctgggactacagttgcctgccatcagacccgactaatttttgaatttttagtagagatggggtttcaccatgttggccagactggtcttgaactcctgacctcaagtgatctgccgcctcagcttcccaaagtgctgggattacaggcgtgaaccaccacgcccggcctctttctctctgacttctgcttccacagttccatctcctctcactctgattctcccacctccttttgtcacttttaaggacccatgattacactgggcccatccagataacccaggatattctccctatctcaaaatccttaacttaaaaatcacatctgcaaagtcccttttctacatagggtaatgtattcacagattctagggatgaggtcatgggcatctttaaggggccatcattcagcctacacatggcctttgcactttggtttgactgacaccccagctaggccctggccctctgttaaccctgctctggtgtggcagagggcttcccccagagcactgatgcttctgatattgcacattctcttgggttcactggggagcccagcatctctccccaggcacacttatttgcttcactttaggatgttcatcccacatgcacttttatagatccaatgaatcggtatggctgaaccacagggatccctccttatcagcattcacagggcttccaggagcccacagccctgtctctcaaagcgagtgtggtttgtggaccagcagcatctgtaccacctgggagcttgttagaaatgcaaatctcaggccttgccccaacctactgaatcagggtctctgttgagggcctagtaacccggacatgctcaagtttgagaagcgtagcccccttaaggactttgcaaccgtccattgccaactggagtgtggtgcaacagtttagtaccagttcttttctgcaaagtactcacaagcccatcactttttccctaagaacatcttccagggcaggtgaaatctcaaaccgacactgaccagcaacagaggtgctggaggaagcaaaggtatatggggccttaagagaccttaattcaaatgctggctcttcttgtattcctgtgctgagtgacctcaggcaagtcactcctacctctggagttaggcaggcaatagagtgtaatcagcatcctccattgctgcagagatagcaacgtacattatcacatcctatccaggtataataaattaagcttctgctgattacaaatgcaggtttgtctggccaaagctgcaccaagatctttttgtgggaacaattgtgatgcagtgcgttgactttggaaccctaagtcagggcttctgtgaccttgaccaaggtacggaaccacacagtgcctcagttttctttttggtatcagggacaaaagaatacgtttttgtctgctctgttgttagctgaaataaaataatgaatgtaaaagtgtctggcagaaagaaggagctcaataaacgtgtgtggaatcggaggaaacaatttacaaggcaaattaatagtataaacaatggtgtcaggggagatatttgacatgctcagaacaaacttcctgagtacgttagcagcctctatttgttttaccaacaattcatgttccaattatgagtgagtcatctatttgttagcacaggcccgagctggaactcagtttggcaccatttcctcatgcaggacttcaagttaccagtgtccttgaaagaatgaaaatagtgatttagttgaggttgtggcacaattaaaactttttttcacaactcctaggcagattctcctccatagatctacttctcttctgtttgtctgagggcagaggaggatgcaaattcattactgatcttgtcctcttacgaaccgtctttccttctcagggttgcaggtcttggaacccaggatgactctccaaagcctacagcaacttgcagtgaaaaaaacttcaaggcttggaagattgtgagtggtaccctctatgaaaggatttgttcttatcagcatctctgagtgttggcagaatggagccataggaaagaacatgggctttgaagctggactgatctttcgttgaatcgtgactctactacttcccagatgcatggctttgtacctccttgagcctcggctttctcatctgtaagcagggttccatgacactcattcatgctgttaaaattgaatgtgactgtttatgtaacaggtacccaatacaaatcctaggctgtttcattccagccccactccctgtatatcaggaagctccttttagactcagtcactccgatgaggcacattgactgttgcaagcctatttaccagaaacagatcagacttatggtcatcttggtgactcagtgcctggcacacagtaggtgcttaatgtgcattgactccaattgacatccaattgagtcaatgaaatttactcaatttctgagtagttcatccaagcaaatcacttaggagaatgaaggcaaccgacccgcgaagcaaatgtcctggctatttctccagcccttctccattgggcagacatttgattgatgccttcgtgactggccaaagtggccccaaaatagccactatcagaatcatcctgatgttggtcattttggatatctgcagacctgagtggagtttacatttgattccctaaactaatttccccgaagtcaaataactggtggaggtcttttcatgttccttgtataaatgtctatttaatcaccatcctgtctctagcacttcaataacttgtacatttccccccttaattactgtttcagctctgcaaagaaaagaaatggttggctgaaaaactcacgccatctgcactatttgagctctccattcccctgactgcccacttgaatacagaacttttcagctaaatcccgttgatcatttggctcatgccctcatattaaacaggagaatcctgaaaccaaagtcactcaactagccagggcaaagctgaggttgggctggacttcccaggacacaccctgcctcctactgatggactccttcctcatgcagctgcagaacgtgcatgtacctttgcagtcaggaggacttgggttcaaacccaagctttgtcacctgctgagtctgtgactttaggtggattacagatgctcccagcactgcagttcacccatttataaaatgtagattttcacacagtcttccagggttattgcacagaattgagatgacatgaaacatgcccagccagagtctggcacatcacagctgcccaatgctatttgcctttgtccttcactcaaaattctcaccgcaagtcataataatggaaatagctcacatttcctgagtgcttacttagggccaggaatgggtctaagcacctcacatgtattagcttatttattcctctttctctaaagacaaaagtatctttcttgattccctaaagctatccatcctcccaactactggactgcctggcctagtgccatttcaacagagttagctgattttaaacaatatgttgctgaaatgatttcttgctttctgtcctggcaagtagcagccagcttgtctgatgtgacaaaatgtgatgaaactaaatgctgttttcttcgctttcagtacatatgagtggtccaaaatctgaactcaaggttaactcttgcagagggggttgggcaatagtgaagggtgcagggaggagtggcttctcatagagttaggaacagggtggcagctggggtgtttgggacacagatgaggtctctctccacagtctaacaaccagtagtgaaagaagtcagagttttgctgcaaagttcaaaaactttagtttggtctccaggcacccactacataattgcatcgtcacccctcagcccagctcccatctcagcacatccagtccctccctccagccaccctgaactaggcgcggggcctagaatgcatgtgttcaatctcattatttcatgtctctgaactcttgcaatggactcctgtcctctcaccctgaagtcctctttctctccttttctactttggagcttctacttatccttcaagatttagctgagataccacctcctccaataaaccatcgaagatccccagtctgatccttggagcccacacagcacctctgtacgctcctggtatctattcacacacctctgtcctcaacatcactgagagctcccaaagggcatgtaccaagccttatttaattttataccccccagcagctagtacagaaacttagtatatagttgaccttcaagagacattggtcgattgaatgaatgaactggaaaatgagaaaatgagcatatatctctactcaggtaagtggtcataatatgatatgataattatatgaatagtaattatgaatagtaactatgaatactatgaatactatagtaaatatgaatagcaactgctaccatcagatgtcaagacactgagctgagcactttatccacattatgataatggctcttgaatattgagcacctactgctgtccaggcatgtgccagttattgctcatatgttatcttcacctcagatctccgaggcaggaattattaccagaggctcatggagcaaagtgtctgtccaaggcacagagctaggaaatggcagcaccaaagacccacgctgaggtctgcctggcactctcccctgaaccatgccatctgccagagagagagccattgctccttgttcctgcagaggacctcagattggcctctgttggtttctgttccaaccccctggttcttcttccaaagccccagtgctcagatagctctgcctcactgttttgcatcccacccaattactgggaaggctcccttcttctggcccaggaaaccccagaagggccagagtgtgcagagctcaagtccacagctgatgccagggaaacaacacaggcattcagaagccaagctgctttatctgactgctgagagattaactcttgcacagctgcaacaaagagaggagctgcaactaaacacatctcgagtgggcctagaggataagacccaacagacacccccctcccctgccaggtttctttccagaccatgggactaactggctgaaatgggacttagggacagctggcacttccccccaaaggcctcctctagaactccatctctcacctgttgctctagtcctcttaggattggggagcacaggtgtctggggagtgcttggcatcttgttttctactttcccttctctgttcccaaaaggaataaatgcccagaagtggcctggttctcactgaaatacatttcactggtgttctctagaggaattaagccaggagccttgttgcaggctacacaagacaacagggaatgttgggggtacctgatggaggtatgcattccccagtcctttcctgtcactacttgtcaagctgtctgttgggtgccggaggcagcaagtacatcagatatgattcctactctggtctggagggggagacaggcacagtctaacaggtgtgatgacatgtgcctgtgtgaggattgacatctaaacagggtggaagaggggcaagaaggggaaggcatcagttgtttggtgatgtggcatagatgcagcaggtggtcaggaaaggctccaaagcaggagaaaccccagagctgcctgttgagcaggcaggtgtcccccaggcagacaaagcagcatgaaaggggagttacagcagcagcggaaaccaaaccaagcagaggggcttgaggagcagggattcagctgttgggagctgttctgtagaccttgagtatatggtatgagggagggtgtggcaagaaataaagcaggaccaggtggagggtctgaggagctcaggtcttaatctgaggacagctgaaccactgaaaggtttgaagaagggaaaccatgtgctttgagcagtgctttagagactactctggctgtaaagcagacaatgggatgcagggtgttggctgggacagagcttgaggccaaaagaccagttaggaggctgatgtgattgaaaggaagcatttctataggagctcagcagagttttcagagctctctctgacacacacacacacacacacacacacacacacacacacacacacaactaatatggtgtatacagtattgttatctccattagatgatttaggaaactcaagaatagagagattaagtcacttgcccaagggcacatggtaagtggtagactcagaatttgagcccagtcagtgcagcttgagagttcatgttctcagccactacactttggtgccactccatcaaagatgacaaaggctagagacaaggcagtgtggttagaggaaaatattcctgacaggcctgctgtatatttggggctccctgaaatagcttctggcttctacagacagaggggtgaagcctttaattctgaggtccttggaaaaacctacagcatgcaactttaaggggctggatactcccaggactgggccatgataggaagccactaggggtcacctgagtctccaggaacacatacctttggggaatggaggtaatacttttgcttggatgtgtgtgtgcctgcaaactcttcaaacgcagggactcagagtacagggaggtaagagaagggtgtgccccagtgggaaggaccttactgtcttcaactccctaacaattgacccacacaactcatggccatgcctgctgcagaggttgaagtcaggtggctcctgaagggactgtgtcctctgcatgccacagggacatgttgccaagactctgatgacctgggccacatggggtggctccactttccactctcccagctcctaggagggacaggattcctaggagtagaggtgggggagagggcaagagtcctgtgtaagtcctctgagagaagagaggcccaaggtcagagaggaagggtacctgtggtttctgtgtaatgcaattagtggtatgcaaagttggactttgaacttgctggctctgagcattggacagctttttagagcttcatttttcttattttaaaaatgggaataaaactcattaacgcagggctgcggtgagtatcaaaagtgcatagtggctgttagaatgcaattccacacactttgcaaagcaatagtcagattttcagaattacatttgatgggccatgctgtaaaacttggagcaggagcgagggcctgttgctacttggatgtaaccttgaactttaatctaactcttgaggctgctaattagtgatcagcaaaaaaaacaataaacaacaagagatcgctgccctcattccttcagcttcgtggaactcagaattgtgcttggagtcctggaagaaatcacttagaagcatatgttaacagcatctcctacttgccaaagcagggagccatcaggtagatattctttaaaagccagctgaaaatctcaggaaataaggaatgttttcggagtggataattcagggctactaaatatacaagcttaaagcaaagccagcaggacaagattgaagccaggattgccttcctagacaaggaataatccaatcagccaatgagagacctggtctgaccggcatcatgccaacacttgttggaaccgtggcatctctttaccatcccaaaaaaagctttgtcagaaatgaggatctcaggagtgatgaatcagatctggtaaaatcaccatcatagcactaccaataaacacacacaccaaccttccctgcactagtggaaaagcccaaacccacctaagggacatttacacacgaatggctggacaggcatgcatcatgctggggcctggcaccagaactcctccaaggcagactgcacaaggcagataccttctgtccaacagctgcgttatccagacccacagcgtgggggaaccggcacagcaaatggtttacaaaccctaagcacagcttctcctggccgcggctgtttgcatccacatgcctgctaggatgctttctcaactccggagcaatcctccagaccagaagacccacacttacattttatgggggacggaggccaggtgaagggcccaaccctggcgcaccactgctcagttccgctggatgctcaagactcctgcattttgaaaaagtagccaaagcatgctgctgcctctcccaccaaactgtctacagcttcagtgttggttttctgggagtttcctcacaagttctcctagattctaagtgtttgggaactttgaagacataagctgcttcggatcgtaggcctgcttagggactctgcgtgattcccctgatgatccatttttcaagcgcttccttttttttttttttttttttaagagccgtctattggttttcccaaagacaagaagtccgcacttaagagatctacactccaaacacagagcagtttcttggagtcctgagggcctggagttgaggtcgggaagaaggaggctgactaatattcacagacgggaccataaggagtagaatgagggctttgggggctgacactggaaggaggggctgggacaggggagctcccactggtgggaggcgactcctcctacagttaagtccaagttcccacaacctgcaggagaagactcaggggacccaagaatgggttctgccttggcatcgtggagtggtaacactgcaagaggcctggggacagccccgagggggcggaacaccaggcctcctgactgccggggagtggggcgcagagggagcgggttcgcgcggagggcaactcacggaggagaagttgtgcggcccgcagagctcgccgcggtacttgcaggagagcagcatgtcctccagctggtggcccaggcggtccatgaaggcggcgctgattccctcgaagtggcgcggaggcaggaagaggcggaagtccgccagcttgcggaaccactggcggcgcggctcgtcgccccgcagcagctcgctgacaagcgggcgcgcggtgcggttgggcagcagcagcccgagccagtggccggcatagtagaggtcccccttggagaggcgcgggaagcgcagcgggttgttgttgcacacagtgacggcggggaagggtaactggcggctccactcgcggtgcacccgcgtgtgtgacgggaagctgagccagtagagcaagcggttcgaggaccaggacagcagcaagccgaaggatgtacagaaggccagcacccacagcgcccgccgctggaaggagcccccagccgccgtgcgcccggcacacatgtgccgcagcccgtgcagtttagcgcggctcagcgatggccgccccctgcgggcgacccctggcccctgcagcgcccgctcgccgcctctgccgcccccgggctgcccggcagccgccaacgccgcgggcgccggctcctcgcgggccatgcggaagcgtcccgggccggtgagcgcggctgcgggcagcccggctccgccaatccggctcattcattcagcccgcggctggcggcagcggcggcggccccggccgggcggagccgccatgggagtccgcagcagcagtggaagcagcagcagcggcagccgcgcgcagcccgcgccagggaagcgtgcgcccgaaaggagctccggtggcgcggcatgcccgcccggcgccgccgctgccgcctccgcgggcgcccgcccggggctgagcgccgcctcagcccgcagcccctggcagtggcctctcccgagcgcctcccaggctttcccggcccctggtcttcctggaggatgcccggcgcccggcactacttctggaggggtcccactgggagccgcctctccagtccctgggtgctgcgcccgccttccctcgtcctggacctcgggggaccctgagccgagtcccccctgccccgcctaaccccagcttttacgctggtcctgggagaagggccactcggccaccatgcctgatctggacatccccagggaccccaccagcccggcccgtagcccagcggtgctgggacacgggagagaaggcgccaaggaacgagcgcccccagaggcgcaccgcggctcctggctgggcgggcggggtgggtgtgtacgggggtgagtggtcgccttgccggctgccgccttctttcccttcccctccaggacccttccttgttactgctccctgggctgcgctcggcagagacctgcttaggcttccccaagtcctgcgcctaagtcctgccaggcgcccgctctcgcctggggctgagagcttctcagggcgtcctgcgggaggctgttcgccgccggggtccttcaaggatgctagccgcagggaagtgtcgcttctcgcctcggctctcccaggtgcctcgcgtctccagaaaagcccagccttgctgtctctcgcgtcttctctctgcccccgcggcgacaagagctggggactgcggggacccgccaacacctcccgggggtgacccggactcgctgctccgcgcgcccttctcctctcgagactccgagctcgcggtggccgtgacgccggctaagctccttccccggttgcccgggagaaccctctttgggccccaggcgaacttgggcagcggccgcgcgacgctggcgcggctgggctccgagcacctgctcctcagctcgctggccccgcggctccgggcgggcggggcggcggcggccgtgagcgccgtgcgctcctggagacgcggtgctgacgcgcccggctcctcctcgctgcattttaattcctggccactgtggccgctgcacaccgagcgggaagcctcttgctggagtcggccgggtgcgggggtggggtgtggtggggagcgggatggggatgcgctgtacagatgtgctcaggtgtatgggcttgtgggagagataagtagtataaccattgtgctgatgtggccccagtgtagacaggggtgagaggactcctgagggtgtgagatgggctgtagagagagcgagttgctgtgtagtgtgggcatttgaacacgattgcgagtgtggtgccaagtattgggtgtgcgtaggatgtgcattgtgtatgtgtgaatgggcatttctgtgaaactcttgaatgtgagcatgtctgcgggtggcgtgctgtggccattagagtgtggtgcatgcaggatgtagtgtctatggtgacgtgtatgttccgtgtgtgtatgtgtgcacttagtgagtcctgggtttgaaatgcatgtgttgatgtgtggatggatatcagggtttctagatgtggtgtgtggttggtgtgttttgtgtgtgtgtgtatgtgcatgtgttgtatgtaatgagtatgtgtgttgaggcattgcgagcagggtaggctcagtgcgacaatcctcccctcagcctcttagggacatcccatgtgtgtcccagccccttccctggaagtgcctactgctcagccctggcccagtctgccaagcacagctctccaagagggtgggaagggggagtaggacttccagggacaggagactccatctttcccattccccttgctgggacagggaacacttggagccccattactccatgagataaaggggttttccagacattatccggagagtagaatttggtggtggaggcagtgtgaagggactccaagggtgggaggatgctccagtggaagaaggaccaacgtgtgtatcctttggggagaggaggcttggggaagcagagatttgggtgtggagaggagttttaccgtctttgtaatgatgaattaggggcaatttggccagatctgttgaatgagctgtgggtttccaagcaggagagaagcagtgctgggatgggctttccctccccactgacctgagggcacccttacagcgtgatgactccctgcatctggtctctggagaagaggacctctgagcccctcatttcccactcacccacatacatacatccacacagtcacacatgtacaagcacacatatacacaaacacacacacacactacacatacaacacacatatacatgaacatacatgtataccaacatatacacttaaatgcatatatacccaatgcatactgcatacatacatacacacaacacacatacatatacacaacacacacacacctggaaacccttctcactcatctggggaaaaagctattgcagttgggcattgatgacagtttgctttgggtttggttgcttgaagatgtctgttgctggctttgaggggagggttctgaagctgcctgctgtactggggcctctaccaaaggctcatactccagtgctcccagcctggtctcaagggtcctggaaatgccacagtgacccgtgtcttggccaaggtggggtgacctagtgacctcagtgcagttactgatgaagcaaccaggacaagcatgtgccatcttccagcatcataaatctggagtggcatgaagctctattttataaaagcctttaaaacattttgggtttctgatgtgttcagctgttgtgggcttgctctttcctagctatttcccccttgaaatgtacatgtgctacttttgattgaccaactgtcttctctgccatgggatttcctgtgaattctccagatggtagctctttcagggagaggaggggtatcctgcttaggcctcaaggggccttgacacagaaatctagagaaagacacacgggcagctagtgactccaagcaatgattgatggctctctttatggcacatgtatgcagcacattctctatgcaacttgaaatactcccaccctcttctctgaccagttctttgaccagcccagtgaaattctgttctttcttcaaatcacagcttatgcattgcctcctaggtcaaggtttccttgattctcccagacaaacttgggtcatgtttttcctatgatcccagcataccttggaagattgatacctctaggatagcccttatcattgtttgtgtccaagcctttctgctggactatgacccgtttgcagacagggactacacctccttcatatttgtatccctacctcttagcacagtgacctagcacgttgatgaaacactgttaccggggaagaggaaaaaggagctagtatttcttgaacaactactatacgccaggtacagaactaggcacataaataaatgttatttaatttctcactccaactctgcgggggaggtattttggccttttttatacactatttgttttttagggatgagggtcttgttatgttgcccaggctggtcttgaactcctgggcttaagctgtcctcctgcctcagcctcagagtgctgggattacaggagtgtgctaccatgcctggctatttttaccattgttgatgcaaatccttggtgcatgcacaggatttgaatccaactctaactcatttcaaagtgcagggcttcccccctccatcatacttccttacaaaattatattattatgataataatataaatgtgggacttcctaagtgctagggcctcctgtaagtgttttacactaaaaacaagtatcatacatgctctaagtgtttaatcctcaaaatgaggcaaataccattttttctctactttaaagaggaggaaactttaaccacagagaggttaagttactcactttaagccacacagctaccagtcaggagagcaggctttgcccaggtagtcactccatccctgtgttctccagccctagtccacgctgcctcagttctcagaggtacttggacacaatagctcctgtggattagtgttaccatcctggaagactcccttggccagaaaaacaaattcatgaggcagaacaggggtgacccacataacctctccaccaagaaattagcatttagcattgtgatgtgccaatcataagtttttaggaaaatttcccttgtttatctctgaaacatctgttcaccatgcctggtgttctggcattctgtgtgatgttgtgtgcagtggcaggaaagtcttctggccagcctgccctcattctggggtataaccaccaccaccaccaccaccactgataagctgttttctctcattaaatgaatctgttgggaggggagatcaatgtaagtgaacacggttttctgtttttgtaatacaattttcagagctgacacttgtgtggcttgatcaggtttcactggatccctcagtgttcctgtttacctgctactcagaggctcagaattggaaagtatctgagatactacctaagcctccttcctgcccactgtaggaatccgttcaatacattccttcagtgacagtgtaatcaattctattctggaacatcttgctgtgtttaaagcttcttcctttcatcagattgaagtctgtctccatgtgaatttctcccatttctcctaatttatccatggggacccacacaaaaataactttggtatttctttcacatggaaactcttcaaactctttatagaatcagagcacgttgatgctgaaaggggtctagcagtccacctgctagtgaagtcctcaagaccatcctttcttctccaggctaaatgtcaccagttccttcaactgtttctcctgtagtttttgctcttgagataggctcttgggtgtgaatctcctcgcaatgtgatcctccagccctgtggagtataagcctaccaacccttttactcttgatctggtacttctagctcctgatatttctgcgggtggttgggggctcttgaccgtccccttgcttcaggaatttcatggaggtggtgggtggagagatgaaacagcaatgatgggttcttggtgtgctgcttagaatgctgtatgcactttcttttagggctgttatgcaaatggtgataagagccacattacttttaatattaaaattcactggccaggtgcagtggctcacgcctgtaatccagcactttgggaggccaagatgggcagattgcttgagctcaggagtttgagaccagcctgggcaacatggcaaaaccctgtctctacaaaaaacacaaaaaattacctggatgtggtggtgcacgtctgtagttctagttactcaggaggctgaagtggggggatcctgagcctgcaaggtcgagactgcagtgaactgtgatcatgccactgtactccagcctcgggcatcagagtgagaccctgtctcaaaataaataaataaataaataaataaataaataaataaataaataataaagtttattgatgttatgaggcacatgggcttttgtgggggtaactgtgaccctaaatcaatctcttttttcccctttctctgccttttttttttttttggtcttatttctgtagttttcgtggctctgtgtcagtctgcctccctctcccctcctgtctttcccttctcttcttctcttccctttttctctctccaactctgcctgaagctaggggtgctctctgatacctttttattatttatttatttatttatattatactttaagttttagggtacatgtgtacaatgtgcagttttgttacatacgtatacatgtgccatgttggtgtgctgcacccattaacttgtcatttatattaggtatatctcctaatgctatccctccccacttcccccaccccacgacaagcccttcctgtgtccaagtgttctcattgttcagttcccacctatgagtgagaacatgcggtgtttggttttctgtgcttgtgatagattgctgagaatgatggtttccagcttcatccatgtccctacaaaggacacaaactcatcattttttatggctgcatagtattccatggtgtatatgtgccacattttcttaatccagtctatcattaatggacctttgggttggttccaagtctttgctcttgtgaatagtgccgcaataaacatacgtgtgcatgtgtctttatagcagcatgatttataatcctttgggtatatacccagtaatgggatggctgggtcaaatggtatttctagttctagatccttgaggaatcaccacactgtcttccacaatggttgaactagtttacagtcccaccaacagtgtaaaagtgttcctatttctccacatcctctccagcacctgttgtttcctgagtttctaatgatcgccattctaactggtgtgagatggtatccaaatcatgagtgaactcccattcacaattgcttcaaagcgaataaaatacctaggaatccaatttacaagggatgtgaaggacctcttcaaggagaactacaaaccactgctcaacgaaataaaagaggacacaaacaaatggaagaacattccatgctcatggataagaggaatcaatattgtgaaaatggccatactgcccaaggtaatttatagattcaatgccatccacatcaagctaccaatgactttattcacagaattggaaaaaactactttaaagttcatatggaaccaaaaaagagcctgcatcccaagtcaatcctaagcgaaaagaacaaagctggaggcatcacacaacctgacttcaaactatactacaagactacagtaaccaaaacagcatggtactggtaccaaaacagagttatagaccaatgcaacagaacagagccatctgatacctttcagtcaatgctactggtggcatgtggggccctagaggtggccagtgttatagcatctaagcaaatgtccaggagtcatgatggggacacctgtactggtggaaggagagagaggacttctcccctgcggttttactcattgcacatggatattcctacacccttcccttccttccaccatggaactggcactggagttgttgttccttccttcctttcatgtgcttcagcatctccactgcctttctccctcactctgtttttttttgtacacgcttggcctcacctaattctctctttttctggggtcttttttagatgcaccaagtggttttttgcccttttagtcattctcattttacttgacttcaagctctcagctccctttcttctatcacaagcaattcccaggtataagaggtcaaagaaggggccatgaccaccaaaagaaagaacgtgggctagaaggaccaggtccagagtaaaaggagctaggaagctcatgctccacagggctggaggaagtgtggctgaagcgttgtggtccctgcttaatggagaaccctgtgaagtgggagctgggtataaaatataatttaaccctttcactttcagcggaggaagtcaaggtccagagttgggagagacttgctgtaaatcacaccggttgatactgataaagggcacaaccagaatccaggttccaacttctaactcattctctgctcaccctatgagaggatctttaaaaagaatccattttgaaattggtaacatattcacatgtttcaaaaaacacaaaagagtatctagtaaaaagtttctccaccccatccccagcccccacagccacccagttttcctccctggaggctcccaaagccatcaatttcttgcgtggtcttttagagatactttatgaatatacataagtgtacatagtctttatatgccctttttttctacacaaatggttgcagtcagtgaatgttgttgactaaagtaattgtatttcatgttcttcacaccttttttttttcagtattttcagctagtttatggttgccttcctttggcacctcatttcaacttctgttattttccttaacttctcatttcccattatcctgttttcccatccaaaaaggacagcaggtcctatgacaaggtggtacacaagcttgtcatcttatgatcagattttcccttaaccctttgctagataccctaatggatgaaagctctcatgtggataatcttaaacagcaggttatgcagatatttctgtttgcctctgaagtgcattatgttgtgtatttgcataagatttaattttcttgtcatatttttctcaggctaattataacacacgcaattgaatgtcctaagcacacagctcttcttggtctaggaagatggtccaaacatgccttggttggcagagagatccagtttaggattcagaagtttctgtaactaacatttagagtgggtaaaacataacagggagagaaccagaaggtgttagtgcaaaaagtcatcttaacgagcatgcagtttaactaagataggaaattgaggtaagtttagtgacttgtccctggtcactgagaagttgacataatgaagatgatgaggatgataatgatatttgatagttgacattgattgagcattatctgtaaggcactgtgctcagtgaacatgatttaactcattctttttattcatttatttatttatttatttatttattttagaaaaaaaaaatgatgtctcactctgttgcccaggcgggagtgcagtggtggtgatctcgactcacggcaacctccgcctcctcagttcaggagatcctcacacctcagcctcccaagtagctgggaccacaggtgtgcaccaccatgcctggctaatttttttttttttttgtattttttggtagagatagggtttcaccatgtcatcgaggctggtcttgaactcctgagttcaaacaatcctcctgcctcgatctcccaaagtgctaggattgcaggtgtgagccaccacgcctggccagacttaactcatgttatcttcacagcaactctatgaagtatgtcccaccattatagctctttaacatgaaaggaaactgaggcagaatgtggataagtgactagtctgtggctgggattcaaactcaagtagtttggctctagagcatcagaccttaattaaggtggctggaaattagctgaaagtaatgactatagtggttatttattgagcagttaatggatgttgggcactgtctttgatgttgagaatacaaagtccacttagatgtggtccttgctttagctctcagtttagtgggggacatgagaaagaaaatattaaatattcatatgaaatgttaattattaaaaggcaatttaaataaagcatgataaatgctttatcagggatgagcacagcatgctgggagggtcccagggagaggtctttttccctcaactggtctgagagccattgccatgcactttctctgttttctcctgagtttctccattcattcccatgttctcacatccactaacagggaatcctgttacctctgcccacgaggctcacctgggagccaggatctgagacaggcagaggcaacagcagcacagcttctccttcagatgtccagaccctcttcttcttcaacaatgtccatgtccttctcctcacaggggtttggtgttcctgaaggtgtcttgttgactggtggcatctactttctaagttcgggccaccttcataattaatgtctccttccctcagcatcccttgcctatcattgctttattatcagtttagataactgagttttggttgcagcattggctgtggtcataacgttagcagagaaatggagtctttcttgcacacttttctacccaatttgctgtcccatacacataacaaaactctcgttaaaatagttaagcgtaataaccttctccagcagtaaccatccactcatgtgacgaaaagatatgcagctaaaataggatttaatgaaatataaaacccaaggtagaatgaggcattttattcacaattcctttactgtccccttaactgtcttcagtcatgacttaatcatggctctcacctggctctcacctctgcttcagggagcactcactaaccagctcctaatctgtcttgcatacaggccctctgcagtggcttagagatttaaggccaagctgatgtgtcaaaagcctccattcaggctggctgcatttcctcctagccacagctctcctgtctcacccactaaggggttgtttactctctttcccttgtaaaagacctggccaaaccacttcctctggtttctctactcctagtttatcttccctgtctacccacaagaagagcagaaaggaagagttaatatattcttctgcagtcctgtggacctgtgtgattacccaaacagaagggaaggggaagagaaggcaggggagggaaggaagttaacacagagtacagccaggtatctaccaggtactattatgggcatcttggagtggtttctcaggacaactctgtcagttgaataatattatccctgttttacagatgaggacacagaagctttgtctttccaattctattctctctgattctggtttgaacatagattaaatcgtaatggccataatcccatactctaaccattcactaagcacttactagaatccagcactgaattaaccctcatttttcaggtgaaggaaatgagtctcagagaggtaaagttaactgcctggggtcacacagaatgtgccacccaggtggcagagccaggattccaactcaagtgtgattccaacatattggtaattattagaaaagcagaacacccagagtttagaaagagaaaagacaaagtgggtggtggcatagttcagagttttgcaaaaacccttgggggagatgaagaaagtgaaagcagaattttttggggcctgaagtgggttctcagtaatctgctgtagatctgggagctatgtttttccgagcttgggtgtaatgtcaccatcgggacagaactaaaactatacgagcccacttgtagggaagaggttcagggaggtacccataggttcaagtaccaggcttggctaagtaaattgcagaaggccacacaaaaacatttcctctttcaacatcgaagtgacattacacaccgacagcaactacatggccacaaagtaggaacacatctttacaaaccacagggtttcaacctagccccctttgtctcccttcctccattcctttcttttccttctccctctcacttttctctttccttgcttgtctcccttcctttcagttcttcctccctttttccctcttattttcccatctaccctccttcccttcctttcttccttctttccttcttctagacttcagccttgctttctccttttaaatcaatactttccttttcccagcagtgcttacgtttattcattcaatatttctcagcagcctatggcactaagacacaacattagattcaaaatggttttctgaaaattcttggagttataaaggcaagtgcctaacattggtaagtaataagagctatgaaaaaaaacagttcataccctttgacctagtgattccataccctagggttccccaaggaaataacctcaaagcaaagtaaaagtacaaaataattcacagtagagcttttcataatagagggaaaaaataacaaattgaaaacaaaacatttcacaggtccagtaatagaggaatggccaggcaaatgatggtgataccacgtcatctggaaattatgacactttaagaaaagaacatgacaaggatgccagtgttttgcattagatataaaaagtactgagtaaaaaaagatctgagtccaaagagcacatccaagcacatcacaacttcagtgaaacatttctttgaacatgaacaatggtcagaagagaatttaggcgagacagggtttagttacaaataggttctttgggtaaagttattaaaattttaggcaaacaaaccaaaatccaagcaagcttaccaggaccaagttaggaaaggtactttggaattagaagacttttctgtctctataaagtgttcttactgtaataggggccactgcatcctcggaccttttggttgacctgactgtcctccccagcctggcactgcccaccaaccagtaaaagtgagccacagatgctgctgcctgatgtggctgacctcattccccctggcctttgcccattctagtatgtttcctcctggcttttgactcctggatgcccctgccttatgaagctgtaccaggatccccgccttagtctcaatccattttaaacacaaaacccagcaatgagtcacatggtagatacatgaccagagagtgacccataataaaaacaaactcagatgcgaaactgtccccaatcaggtggtgttcccttgtgtcctttctgcttgtagtgcgtctgccgtctgttcttagtctccgcctggagacctggtttggtgcccttgacccttggctggatctccatagcttgaagggcctgagcattttctccagttacaactgtgcttccatctttaactacggttcgaattttctttggtgttagcacccgtgatgtgttttattttcagttgagcggcagtataaggagataagaaaaataccctttgaggaatcaaaatgcatgtcacaaaatccatactattaatagctttaattaattgaggctagtaacgtggcaggcatggtgctaggaactttgcatgcattatttcatttaactcccacggtatccctaacaaagtagatgttgtttttattggtaccaaggaagaatcaggctcagagatatcaaatggtttatttcagattaaacgcagattttgctgatatcaaatcctcttcccccggcctcctgcattacatgatacagccttccaggcaccagggattccacagcatggtttaagcatgagtgagcccttgtattttcatggagcctacttactcttactttatgcacgatcatgataacatgcttggttatttgtttttcacactttcagcagaatagaaatactatgttatgaaaacaaaaaggcttaagacgtaagaatactggtagctagaatgtatagccaacacctgacaacaaagaaggcaaaacaactaaaaaacataaaaaagatgtttaaaatgatgtcatttaatgttggggcaaactccacacatttcaaatagtcccgaatcttttagccccaaacaatagctgaaactcacaatgatgatcttgggccatcaagattacattttgttctgtataatccgcgtaaggatataggaaaggacaggatctattgcagaaggaatttcagccaaatggtttcattaaaaaaaagttgtgatgcttaaaggaataaataaatccttaattcttggacacattggctattcagaaaaatgacacttctttgtaagagagtctgaacaacaatttcattctctcattggccaattgtttcagcaatcaccatagataaaagcttccctatagccattttttctaatgagcaaacagttattattcgatacatggctcaatattcagaattggttacattgcagccagttgggttatgttgtcgatatttagtcattctataaaagggaatttcatggcatttaaatgtttctctctctttcctgtttcttaaactaaaaacaatgacagaccagtttttaccacatttttttccctgaaggaataaacgataaaagagaaatggaattctatttgagaaaacagttctaacgttcatgcctctatcagaaacattttagggttttgttccataggacttggaattctcaggcggtaagtgacagcagcattctgacttacagaggatgtcagaagctaatgtgtcctgtctattagcttcctgaatgcaaacttctcttggagtgttttttccccctagcctgtttttttccatttcacatacccacacattaatacagagaaatgttaaatgtctgccctgctttgtggagtattgacaatgtatccttttaaatttggaactgcagttttactcgtgggaagaggtattttggtcatgaatttgaagtctcttttttatctagaaagcttggacttatcctcaactaagccctcacttctcccacattccatccatcaccaagggctgtcgatgctccctcctaaatcattctcaagtgcatggcctgagatccattctcatcgctactaccttggttcagctcttgttgtctacagcctagagcttactctgttattatagctcttaactgggctccttgtctttgatttccttcctctccaatccattccccactctgccattgtaattatgtcattgctctgcttaaaatccgtcaatggcccttcatttcttactgtacacattcataatctgtgtgctgtgtcacacagtgtgttacaggaaatgtaggtattgatcctcacagcttttggggcaacgaggcaggcttggggcatcaggagccccagggactactcaagattgcagccctgtccttttgccccagtgtactgtatatatctatatattatatattttcttcttgaaaaaactccaggaagttctgggaaaggctagcttataaagcccttctcaccctggccccatccacctacaagactctcatgggacttcctaccctacaaacgctttgcctcagctagtaaagcctcttgctttcccaacttaaatccacatcacatttttacaacactatgactttgaacttgaggcctggatagtgttctccttatttctttacctggtggtcttctccttcttcttcttcctcctcctccttctcttcctcctcctcttccttcttcttcttcttcttcttcttcttctttttcttcttcgtcttcttttgatggagtctcactctgttgcctaggctggagtgctatgtcatgatcttggctcatcactgcaacctccacctcccacattgaagtcattctcctgcttaagcctcctgagcagctgggattataggccctcaccaccagtcctggctaatttttgtatttttagtagagacaggatttcaccatgttggccagactagtctcgaactcctgacttcaggtgatccacccgcctcagcctcccaaagtgctgggattacaggcataagccagcacacccgaccttctactcatcttcttagaccttgctcaacattccccttctctaaaactcttccttgcttctgcagacaggattaatcactccttcttttcttttccattgcaagctggtgggggaacttgaggaaggtattgaaactctctgagtcttaatttccttatttgaaaaatggagataataatacctgccttgcagggtcagcataaagattaaataacacatgtaaagcataaagcacagagcctgacatatagtaagtattcagtaaatatttgttgaataataaatggtggttgttaatattcactaccaatctcttgccagtgcacttatctcataattgtgcaacggttgttagctcctgttttaagattttcttattcatctcagtgccataggttctgctgtgctaggatgtcttttccatgaaggaaaggatcttgagtttgtacactggtatgttctaaatacctcaaacagtgcctggcacatagtagttcttttataaacaaattgataacagaactgataacagatttcttgcctgggatagaaaactaagctaattaaggagagtgattcaatggccttcagcttattatttcagaaatctctaaatttatgttttctttcactgatggcaaatttcaatgaccatgcatgattcctttaagccactacatcttcctcctcccctcttttcaaggggaagaaaaccctccctgaagttcaaggcctaggttctatatagtggacttgcttcatcctgcttccaagactttctgtgttatgctccttgctcttctacatcttctcttgccttaaccaaatcatttggacttcatggtggaatcaatgaatcaatccctgctgtactgtcttactatcctctcctcatcttgcctaagaccagcccagccagaaaccaaattctggttctagagccttgttcagtgcgtggaatactgtaggtattcaataactttgtgtcatcactgaacaaacgaatgaatgaaagatgaatgaaaaaaaggaagggaggtaggaggatagacaaaataatagaaaagaacaactctattcttctgatagatttaacctagatgacacacacaaaacattggttgagctggtttatttctggcaaaaggcagtactgcctacataccaacaacattatgaatcactttcataattaaggtaaagtgcctttttttgtgaaaaaaaagatggaataggtcacttcatggaacttgtcaatccgttcaatgataactatcgatctcctttgtcgggtagacagggtttgaactggctaccatatgggggtttggcattgaggtagccatgttctacgtatgttgaacagatttctctgattccaggctgataaatgcttgccacactgcaactagggataatgaagtggcaacggaccaattctgtttgattaaaaagctttcttccattcccaacgtttcctgattctgctgctacaacttggatcttttctcagatcttttttctgccaccaactccttttttttttctttcttctcttcctctttatcttcctcctttctcctctgctcgtagctcagatattgactttcaaaattcttggtcagatgtcgtagattgtctgcagacacacatctctttttcttcatataccccattaaaatgatagtaaaagaagaaaaaggaggattcttttaaagacaaagatgagacatcggtagattcaatatttcaatccatttttgaaaagcagaacataaatggcagaagagaggagctatgcactaaagtgctgcccaagggaggttcctacaaaactgagcctgagacagttcacataacagaatccacatacctaagatgctttctaggctgttgaacttagtctgtcccaaactgaattcatcatcttcctccttatcctcctctaccatcaccaccaccttcaccttcacctccacctccactgtccccttcctcctctcttctcctaatgtgttttcccctcttgtggcctttatcccaaaggatggcaatactgtccacaaagctgaagtacatccccgtgtccatcccttaaaaccccttgtgtagacttctattgtggtacacatcatttcacagtgcaaacatgtgctcctatatctgtgtccccagcagacagtgtgatcttagagcacattttattcttgacagtaatcttaaatttgaacacagtgcttggcaggtggtaggcattaattaaataaagatttggtgaagaagctcttctatctggaggttattttgtatctagaatgccatgactcctcccctccaccccatggagtcaagcaagatgatgtatttatcagtcaaaaatggtttcaaagttgagtaatagaataatattactaccatggtatcctatattatcaaagtatattgtatccctgtaatattaatactccgtattattgttataccattatttgatgcttgttcattgaagcctgggtgttttgatgtctctatgctacctcttaatccctttgatatccatttgtatggccagtctgtggtgataagagttgacatttatgcttgggggcagggcaaagtggtacttagaataccatctggcctgggtatcaggatctctagggtcatgccccaactctgccactaacttactctgtgcctttgtctctccaggaataggtccctcatctttaagatgacataatttgactagatgacctctagggtttgtgtttctctaagacttatacacatctaggctgatcattaacctcaaactagagcagctccagcctcgtcttcagagagaccttgagtgccaagattgcctccttaattcaggagatgaatgtgcattgacgaggacaaaggttagggactgtggtgctgatctgagggaatagcctggactttgatccttaggctcagaaccaagtaaaaaatgcctctgaagaagttggacactgactgtgcaagggtttgatccttaccttgtatcttctgctgttctctcttttaatgttttttctagaaggggaaaagtactcatatagagtccaagacacagcgtcttctcttggaacatgcacctgctgatttcagtgatgtttgcagtacacaagattacttgggggccaggaggaaaacttttcttatccaaatatatagatagatataggtaagagatagagatacataaatgtatatctatgtatatctatatctgcctctatatctatctacatatagttgcatttttatctcagtataatctggttcaagggctggagctttcttgggaatcacaaagcctgattttacagctttggttagagatgcagacctaggtaaacacagacctgccagagcccctctgggttcaaaagccctgaggaggaatggtacaaagctcagaccctctgcaagactccagttccatcctaggctggaaagagaaagagagggaggcagcgcatccttagttgggcacctgctgtgtgcaaggtgccaccctggctgctttgcatctcatctgattttttcaaccatgcttctaggtctctaggtatgactggcccatttcatagatcgggggagtgacatttagagagttgaaataacttgcttaatgttccacattaaacctgggatttaaattcaggtctacctgactccaaagactgtgctctttctactagatgatgtaccaccccatgtacattctggttgctcctagcaattgtgtgtgtttgtatgtgtgtgtgtctgtctgtctatctgtgtgtgtgtgtgtgtgtgtgtgtgtgtagatgtgtgtaggtggtggaggaatagtcagggtaggggaatgcagggcagcccagtttcttctgagcatatattcaaatcacaggtaggaaactgctaattcttcatgtacctgtttgctctgctaggagctgagactctaggagtttgggagatggagagagaagttcttctcatccatgtttgggaagcacaactctatgtagcagcccaaggtgcaggtaggagtggggtggcaggtatcccagaaggaaagctagaggtctcctttgaacacagagaggagactcttccttgccatcagctcatccctaggcttctttcttaaccctgcttcttatttcacatattttctttggagaatcatctatttccctggtttcgactctcatctttttctcccaaacaccttcctcttgagtttctcagcaaatggctccaccatcagcaaatggctccaccatctccccagctttatgttgctgccatattgaaatactaaagcagtcttttcaagttccccttggccttcagaataaagttccaaccctgcagtggtctctgggagtgctgtcaagcatataaagacctaggtttgaatatcgattgtgcatcttattgcatatgtgaccttgggtgagccatgcaatctctcctgctttgtctccttatctttaatgtggagttaataatattgatactgtagatttctgtaaataatgaaataagtgagagcaatataggtaacctgttaaacctggtgtatagtgcctggtgtatagtaaacaagctttgaatggtagccattcttaaatggcagcattctaaactgttattgggacttttagtggggtgacacaggaagtatcatggtgtccaggtttctctgtaatgagagaatttcatttcaccatggatccaagttaggaagtgacctttctgccaaatgtagtctgttgttcttctctcaaagcacagtagagaaagcatcgtggaacccacccttagagccaatatggcagacatcagagaggacccagatgcagatcacttaaggtccgcaagatcaagcacagcagaactggccagccatgctatgagtaagaagagggatgagcggcaagggctgcacctacttagctttttggagagaagtaaatatatccataaagatcaccaagaaagagtcagtgtgggccaggtgcggtggctcatgcctgtaatcccagcacttggggaagttgaggcaggtggcttacctgaggtcgggagttcgagaccagcctgaccaacatggagaaaccctgtctctactaaaaaatacaaaaattagccaggcatggtggcgcatgcctgtaatcctggctcttcgggaagccgaggcaggagaatcacttgaacccaggaggcggaggttgcagtgagctgagattgcaccattgcactccaggctgtgcaatacaagtgaaattccttctcaagagagtcagtgtggaagcaaaaactcacgatcttccatattggtgaacaagaacctaaggtgaacagttagcataagagcagccctgggctggttgcagtgcctcacacctataatcctagtactttgggagaccaaggtgggaggattccttgagcccaagagttcaagaccagcctgggcaatgctgagcaatatagtgagagcccccatctcaacaaaattttttttttaaaaaattagccaggcatagtggtgtgtatctgtagtctcagctactcaggaggctgaggtgggcagggttgcttgagcccaggagtttgtggtttcagtgagctatgattgccgtcactgcactctgccctgggaaacagagcgaaaccctgtttgaaaaaaaaaaaagaaagaaggagaagaagaagatgagcagctctgcacactctgggaagaatcctgataggactcaaaatctttctttaaccacagtgtttaagagttattcttttcttaccctttaaaggaattggttgttccatcatctggtgtcatcatccgttgtgtggtttattatatataattaggtccaataaatgtttgtctttttcatcacaggaatgtggactttatcattctctacaaatccctgtgctttctccacaaagttcagagctaaaaactcctctggttattatgacatttgaataactgaacgatgggcccctgtgtgacatttgctaagaaatcccttctctggaaagctgattgaatctctgctctcatattttctttcttgtacttgcccattacacatgccgtttgaagaattccaattgttccctggcggaatcgaagtagaaagggacacttccgtatccggactagaatagctaagtgaggaagggccatccagagaagccagaagtgatggtggcagagacttggcctgacagagatgggaaagttcagacaagcagaaggtagggacagatgtcattggtgacccccttcttcatggagttctctcacagaggatgtgttattttttgtttccttaaggttgattaaccttgattatactttgattactcaaggttttgcttcctctgtggttatgtgtgggtggcactatcacagagaggaaaagcaatggggtctggagctagagacgtgggcttgcctttgtgtctatactctttgttatctgtcaggaccttgggccaagcatgggacaactcagaccctctgtcttttcattgaaaccttgctgaaaggctgcagggaggattaagggagctagcataggaaattctctgtactgtttttaacatgatactattaatttccttcttcctttctctttctttccataccagaccatgaggtggggactccctaagtgctattatctaagactgctgagctttctcaggacacaattccttgttggctgagcatgcatatttccaagaacttgggtattcttgagatgcggattccagcaaaagaatccatcattccatccctggtggacagggagaaagtgagatgtacatcactgtgcagaagaattcctagtacttcagttctgaaatgttctcactgaagtctgcccttctggggatggctgggaaagtaggggtttattatataacatggatttgatgtcaggattttcacattgagttttcattaccaggcctcataaaaagcagaagagctcagtgtaaaaggtttaaaaaaatatattttttacaaagataggcaagtcaggggctctgacacatccttcactctgtggttcttaagaacaaagacaaatggaaaagaacgattctatttttatgctttgaaagcacttactttaggtcaggaaaatagccagtgtggatgtttagtcttgtcaatatagcttggaccagacctttctttttcttcttcttcttttaattaattgggaagctggcaatgtagggaggtagggaggctgcatgagacacacagtcttgcctcatttcaaagggattaaggaaattggacctcttgtggcagagaaaaaagtaaataggctttggcatcagagaaacttcagttgaaatttcatttccattccttattatctgtgtgacccaaggcaagtcatttaaatcatttaagactctgagcttcagtcttctcatctgtataatgggggtaacacaaactaccttgcatattagagcaattaaatgtgatgtggtatgtcacaacagtgtctggtatctagtgggtactgaatgcacaattaaacaaatagctaaagcatgtaccaaaaatgtgcagaagaataatgttgctctctgcaagcacatctcaaacagaacccagggagggagaaaacatgggcctgcccgctatggctattattctgagatttattcagaataaagacatgaaagaagaatcaagtaagtagaaagcacattttgtgtgattattcttataaaccctgcatttgtattccaaaacgctttgggatatcttaaaataaaatataaggataaaatcaaaaaggaagctcaaagatgggaaagtacatatcgtgattgggctaacagaataactgagttcggagcttcctggtaaacaagtcaagtggagaaaagaatgggttaaatgattctcattatctgagaaagcacatgatcctgctgtttaagggaggaaattttttcttggcattacattcccaaaggaatttattacaaactcttaagaaatgtataatgcttcacttgatacttgatgcatatcatatacaacacagggaatgatgtcttccacaatgaccctcttacaagtgtgtttcttttgacctttgccatactgacccttgaagaaagccaatgaggatcagaaaccacagtggagtactggctttgacatcaaatagacttgggttcaaatcctggttcaatcactttctagttgcaagaccttgtgaatccattgactctcactgagccttattttcctcctctgcaacatggaactgataatagtgccctcccccttctgtggtattgctgtgtgcattgagtgagcacacaggtgtaaaacaccgagcttggagcctggtacaaagtagatgcttaataagttggatcaattttattccccttctttttgctagaaatgtaacctcatgtggttttttcctgggagtgtctaaactaatgagctaatttactttcagccttactatgtttagtttcatactctctaatcctccactggcatcagagagatggttctgaaatacagacctgaacatgtctctcctttgctgaacacgctacagtgtctctccgttgtctacaaaatgaagggcagattgcttggctggaagttcagatctcttcaccccaactctctctgctgtctacagccactgctctccaacaagtgctctgcgttctaggcattgcaaactattgacctgtccatgcatatataatgcctttgcaccacgccaggctaatttttgtatttttagtagagatgaggtttcgccatgttggccgggctggtcttgaactcctgacctcaagtcatccgcccatcttggtctcccaaagtgctgggattacaggcatgagacaccacgcctggccatcttcatgttttaagaaagccttttcttccatcctactcagtctgttagccccagtgaactagaaattaaagatttatgttactgataactatttttagataaaattttgagggcaaagctttgctggaaatatacacagtaattgtgtttactgatcatcgccactcccaaacagcaattcacggtataaaactcaagtaattagaacaataagcccaggttaattaaaatactgggtaacatttgggcaagaataaaatccactttggagattttccagacacacattcattttgtgtgcacttaattcaccctgggagctggtgctgacaaggtactacactctgtgctaatcagcactggtctgcctttaatcacgccctgcacatttctctttcctggctccaggaccagcttcagagacctgggtccagttgccgggagaacagcgcagcagttgcttaggcccgatcttgggtaccattcttgtgttattactaaccatgccacttgccttaacagttataggctggctaattaaagcaattaatcaagtcctcaagaagtttgcatgctgtttggagtttcttctgcctttgcccctacatctggtgcctgaggcctgcttcccttgcagtgctgtgattcccatgtttgtcagagtaccaggcatgctgtgagcagttcctcctgctgcaatcaagggttcatgtgagctctgagggtagaccttaaagggcaaccctccaaaatgctctcctgcgaaacctctgcctccaggttgggtgagcatctcctgtgccattcttcattgcttatacttgcattgtcaacatcctaatagatgtctttgagctctgtatggtcagactggtgtttttcactttgtattttcaaagctctgtccaagaccttcatctaagggacacccaatgaaaattccttctcctttttacaattcctttccacccaaatgactttcagcttaggagaataataaaaagtcgacagatgtttttcaaggccaggtactgtgctgagtaccatgtggaatcagagataaataagacctcactcttgtaggcaagaagtttacaatctagtagggagataaaacacattcaccgatgacagtaagacaagaatcccataaaagaaggtcagagaagataccacaggctctcagaacaagagaaaaacacagctgactaggaaatccaagaggacttcacggaggagatggaatttcagctgggcttttgatttttgtgaaatggatttggacgtgtggagatgagtgtgtgtgtgtgtgtgtgtgtgtgtgtgtgtgtgtgtgtgtaggatatgtttatatatgagcttgtaggtggggcaaggagaaaagattgagaagctcctagggaatgaaacctccagcataagcaaagtcaccgtctttaggaaagagctgacggtcgcatttgggtagagtctgacattcattacagagattaaacatcgttaaggcagcagctggcagcctccagcgacattgcggggtgggtggatttggaatttagcttccccttactgctttcctctttctcttcgagggggcttgccctcctccccttccttcccatttccagacatgctctttgggtttccagggccttcttgctttcttctctcgtctttaacaaagcctattcttaggaagagatataatcttctccatttgcatgtgagtttgggttccaggctgcctgctaccactgagcctgtcttaccatggaactgatttcgcctactgcagagctgtgatgaggatttggtgccaaaataaggtcctaatctgcactcagctttctttcactcctagaaattgatgacagtaagtgggttgcctccctgctgccctccctcgtttgggtgacacaccacaattgcacagccaaatagttttccaggggagaagctttctaagctcctgcccactgagcaacaggttttgtttctcatgactttaattaagggagtaaataaatatagcaggatgacttgcttttattttccttctttgctctagtgagagttctcaccgtgaggaaggtaaatcccctgagatcctggaggtgccctgtggagggtcgtgtgtgtaaggcaccctggggataaatggtagcttcccatctcttacaatggttggggacagctgcattgagcaggaaagaggacacaagaaggcccttttggttttgaagtttgagcgggaaaaagctgttccttttctggagagagctgatgattagggaaggaaagtgattccaggtcctcaaagaatggtcaccaggagcaaaactggggcagccagaaagatggagaaagtctgtgggaaggactaaaatggcaggccattaaaaactatgctcacgcctgtaatcccagcactttcggaagctgaggtgagcagatcccttgagatcaagagtttgagaccagcctgaccaacatggccaggtgtggtggcacatgcctgtagtcccagctactcaggaggctgaggcacgagaatcacttgaacccgggatgcggagcttgcagcgagccacagtcacaccactgcactccagtctgggtcacagagcgagactccgtctcaaaaaaataaacccccaaaaactagactttcatgcatccattggggtagttctggacatcttcagcactgagggagtggctcttcctgcttcaagggtccatagtatcccacatcaggattgggacacgtagctgcccaggacaatctattggtctgagaaggaccagctgatgacaaccacaccctaggacagccagtgatggatggggaagagtttgtgttttccctgtgttcatgtgggattcagaccaccctcctttaaaaaagttttaatttttaatttttatgggtacataatagatgcatatatttatgggttacatgagatattttgatacagccatacaatgtgtaataattatattggggtaaatggggtattcaccacctcaagcatttatcctttctttgtattataaacaatccagaagtagcttggactacaggtgcacaccaccacacctagctaattcttgtattttttgtagagatggggtttcaccatgttgccgtagctagtcttgaacttctgggctcaagcaatttaccctcctcggcctcccaaagtgctgggattagaggcatgagccactgtgcctggtctccattaattacttttaaatgtacagtaaattattgttgactatagtcactctgttgtactatcaaatactacatcgtattcatccctttcttggtctaggaaaactctaggatttgggggaaaaatctttggggaaggagctaagaacaaccaagcaaactcagggcctccagaggaagtaattcatgtgcaacctgggatgaatccctgggatgagtctaataaggagctcgtggagcagtaaaaagcaggagttaatagaagccacaccagcctcagcagcatctgacacccataccagccctgcgtgtgagaaaatgtttggataaaatcagaagctgaacatcttccaaacagacatttcctcccttctaagagggctctctataaaatcctcttgtaaattttgaggtatttttttaaggagaagctctgttactgtcttttttattaatgttgtttgttgaggcattcttatttcagctggtgggcttagcacagcctgagtctttcaagctttaaagggtttcatttttattgcgatagctcttggtgcctcactcttacggaaggagttaacaggcttcccacactatctcagcccaccctctggttctatagacaacaaaacagacctagggaaggtggtgggattgcccgaagtcagggagccagttggagacagagctggtgccagtgccaggttagtatggagttgaggtggacagtatcctgtttgagggttttgttgttattgttggttgcgaacacatcatctcgtcggctcattctgagtttagagttggttggattccataagtgatttgctttcctatgtggaactcttaagccatgatgtgtctgttctctattggagctacaaacacccatcttctctctccttgcttttcctggaaatgcagacttcatgaccactcaagtttctctcccctgaaaatcctatcctgtcaccccagggagttcatggctctctgtgcccactgcactcttataactgatttttttgtgggtgtcataaagtgcttgccatccttactctaccctgaggtcctgtaggcagtaccattcgttcttactgttgtatagtattctacactacaatttatttattcattctgcatggaaggtcacctcatcacttttcagtctgtggctactaggaatagcgctgctgtgaatatccttgttcaaggctttcggtgaacatatgtatccacttccgttgaatatatacctgggagcagaatggttatgtcacagggtagccacatgtttcactttagcagggtcgtgcttgtatgtctgtatctcagcacctagcacatagcaggcataaagtaactattagttgaataaatacgtgtgccattatttcctcgagcctaagtgtaatattttacatttaataaatggatgattagtttttgctgcagagctacaaaaaccttagtcttgcacattcttagcatgttaaagatagaggggaccatttaagttcacccattcatttttacaaatgtgaaacctgaggctcagaaaggaaatcaacttacccaggaatgcacagcatttttgtgtcagaactaaaacagaaaccaagcctctgtaaaaatataaaggcctgcttattgcttctgtgccacagtttaaaatgtttatcatttagttgcattaaaatacttattcctatgtagtacctctgggcacataaaagattaaagattatatttctagcatttattattattattattttgcttcttcctagagggaaccattttgcttcttgctggaggtaaggattaaaaacagctttttttagtcatcagaggaaacaggttgtgattaccctgtatcaaatttttggtagaaatgattccttcttacatggatcaaagatacatactaaactttcattatgcattttctttttgctgagtttacaaccccttaatgtgaagcatgctgccagcttaactagagcattgaaaatgtgcagctctccttcaagccattggcagattgcaggcaggctggtttggaccagacatttcacagcattagaagttaaactgtagtgggaacagtggtggtaacatccagtctcagtctacctgagacgccatggcttccctgtcagctgtctggatcctgggaaggaccacagtggatccatggctctgtgttccacccctagagagtgacacataacagtggtggaaccggtccagaatgaatgaaccctcttgtgcatctgctcttgaacacgtgggagtggagaaggtgggtttgtcttcatttccatccccactatcctagctcttgaacttcagatcttgggagatcagagactgaggcaggctgaaagtggagcaaagccagctctgtgtgtgggtgaggaatgagtctgaatcaccccggtctgccttccgagtgacagtagcaaagccagttggaaggaagatccaaatattgccaaaatccagccgaatgagagccttgttttcatggccctgctctggtggtttgccagaagagtcttcccttgagcaagtggaggtggtgatttgtaattcccatcggttcattgcagcatgcttctattaagtgcctgctgtgtgcccaattaatccaccgataggtacaagagaattagaattcttgacctctgccttcaataaacttaacaaccagtagaaagattcattcattcattcattcattcatccataattttctgaaagcctaccttgagctgtatacagaattaagtactgaagacagagatggttcagacccaatacctccttccaacaatgttactgtctaatagactgataggggagatgggtgccaacaaaatgaataagatggactgggagagcaggaagagcagagggagcaaagagaaggagcatctcacccaggctgggcacgagttggaggaggcttctcggaggaggcttctcagaggaggtagtacttgaatagcatcatgaaagatgagcaaagattagtgggaaaatgagctgatgtgtgtacagtgctcttttaggagtcagagatatctgaacaattagaatttagtacatggtatgataattcaagagaacaagggactggagtatttgagactgtgactatctcttatactttctgaacatacccacaaataaccagagaataatttaacaaacaagacataactgaactctcacatgctgctggtaggagtgcaaattagtacaactgttttggaaaactggcagtatttgctaaagtgaaacatatggctaccctatgacataaccattctgctcccaggtatatattcaacggaagtggatgcatatgttcaccgaaagccttgtacaaggatattcacagcagcactattcctactagccacagactggaaagtgctgaggtgaccttccatgcagaatgaataaataaattgcggtatagtcatacagtagagtactatacaacagtgagaatgaatgatccatgactacaggcaacaatatggaagagtctcacaaatctaaggttgagtgaaagaagccagacacaggcgggcacggtgcctcacgcctataatcccagcactttgggaggccaaggtggatggatcacttgaggtcaggagttcaagaccaacctggccaacttggtgaaacccctgtctctactaaaaatacaaaaattaggcagctgtggtggcagacgcctgtaatcccagctacttgggaggctgaggcaggagaatcacttgaacctgggaggcggaggttgcagtgagccaagattgtgccactgcactccagcctgggtgacagagtgagacttctctccccaccacacccccgccccaaaaaagaaataaaccagacacaaaagtgtgtgtactatatgattccatctttatataaggtacaaaaacaggcaaagctgatctatgctattataagtcagaacggtaattatagttgtagttggcagtgggagttactagaaacaagcgtggaaagtgtttcattggtgctggtaatattcttgtttttgctttgggcattagtaacatgaaggtgttcacttggtgagaattcagtgagcagtgtactctcttacatatatattatacagcaatcaaaagtcaaaaaccttctgtaatcttgggttagactctgggtcagaggcatattgtaagggctgtaggaatttggagtatgtaaaagatctcgatggtgaactgggtcctcctgtgttaaccatctctcacagagaaaattgggggctcctgagaggtttggtgcccttgtgtcattaaatcaagcactgtattttccctcagagaagacctcttctcattaatttggcctttgcagtggatgttactatttcagaagcagaacaaggttatggacagagcaagggtttttttttcacatggctaagtgtctgtgcattatcactgggcaacttgactctctgcccctcaatttccacatcaggtgaatgaggataacagtctggggctggtgttctgacagtgctgttcttatgattcactcctaaccccatttattgcctgcctgctggactgtagcaggatacagtatatgacagagccctgcaaatatgaggaggcattgtattctgacctggggctgggaggcaagggattccctaacctacctagatctgtgtgtacagaatcaagacaccaagactgggtgcctgctgcttcccgaggaagccttccactgggatatcattgctctcatctcagcatttcctgtcatcccttggccaagtcactgaacccacctttgtgttctcttctccccattaagagaggagcccagggatcagtcgttctaacagcatctttgacagcacaaagactgtttctgtctcccaaagaaaaaaaccatgggaaaggagatatgaagcccatgctaatcattcctacagacttccagcctgcctgctgcccttctcactccattcaccaggaatatcacaagagaaccaccctgaaaagagatgtgacataacttgccattgtccctgacagtctgggattcctgcccagtccagagccacaacagatagaggagaggggagggaagaagagggggtgaatgctgacttctttccgggctctgtgcttgatgctttccgcctgacatgctttccatcatcaggcacgtatctattgagtacctattagggtctgagcactggtgatgccacaagaaacaaacaaacaaacaaacaaacaagaaagctagatcttggctctgtggagctcatagtccagtgaggaaagcagacaataagcagatattcacacaaataactcaaaaaatgaacctgtgataactgatagggagaaggagaggaaggatgtctcagagcacaacacaaggtgacctaaacaggtttgggatagtaagagaaggctctgcagaggagacaactttaaagatggtacctgcaggctgaacagaagctgttggatggagaatatcagggaaacattctaggaagagaggatggcttgcatggagatcttgaggcagaaaggacaatggtgttcagaggaactaaaagaaggcctgactggctgaagggtggtgcatggggaatggagaatgccctgagagcaagacaggaatgcagtcaacatcaagatcacagaaggccttgggggtgcgaagacttagaaagtgattttaggagtgatgggtggcgatttaactaggataatggtacccttatacttgtggttttaaaaaggttactctgacctctcaatggaggacagagcagcaagtgggtatgagaaagattggtagaagatcatggctataatccaagcaaaggatgtggtggagtggattgaaggaggggcagtggtgatgggaaacagtggagagatttgaactatattttggtgttagaatgtataggatttgaggatggaaggaatggatgattatgactgctaggttttggccagtgcagttggggggctggtaacatcactactgagatcatccatttctgagatggggaaaacaaggaaaagctgataggtagagaatattataaattctgttttatcctacttaattctcaggagagcccttcctctgtagataagaaaattgagatccagagaggttaagaaacttggtcaaggtcacagagcaagtggtctaaatcttggcagcaagacattttttggtcatttcagagattgtatctgttgtgcattcctgcagcatgtcaccatttacagaatgatttcaaatatgtcatcccattttgatttttaccagtaaaaccctatgaggtaaacagagtaatcaccattatacccattttatgagcaaggaaatcgaggtcattaacttgaccaatatcagagatctatagctaatgtgaataagattgaaactctgggctctgtgaccaccagttcacgcatctttcccaactatccctcattgttatgtttgtcaaatagtggagtcagataaaatgcttgactggctaatgacaggcaatttatttaacctctctgagcctcaaattcttcacttatgaaatggagaaaataatatctgcctccatggtttgtcatgagaattcagtgaagagctgaatgtaaggcccttagtacctgacacaagcaagcactcagttgtctagcaatgaagccactgctgaatatacacttctcaacccaaacaccccttttcccttgaggaaaaccagcagctcccagagctggggagggcctgtagaattgctgatgaactttttccccaaagggcctcctattttctttattcgtattcaattaggacttttagcacagttttctctgtctcactgccttgtccccatttccaaagtcagtccattgctgacttttggcaattattcctgtgtaatttcttttactttgttcctttcttccacacccacaacactgctcagtgtagatcccattcccttcttccagacccatcacaataacctttaaatgtttaactcatctcccaagtgcttgcccaatttgggcatgtacaaatacttccccatattttctcattttctatataagaaagcctagacctcttagtcaatgagtcaggtatcattacagttacctatcagtttctctcaaactcacctcccagtgctattcaacagggagccttctcttcaaccaaaaaagccaacccatcatcttccttgtatcaccctcaatccctccaccacacttctgaccgtattgttcctcactctcagaatatcagcctccttcctttccaattatcttcccatttcttcaaggccccactcaagtcttgccttctttctgaagcctccctaattttccagacttgaaatgtcttcctccattgattctcaaagtgcttagtacagtttccaaggcttgagatttgggatggccttttattctctgttgcaactagagtgcccagcacagcatcctatacattggatagtcataaatatacagtagttacctggtatatgctttaagtcaatgaaaatccaagaaatgcatttatatattattcgtttgtttgattaaccacaatgaaatggattttccacctatcatgtactctgcactgcactggggatgtcagaatgaatgtgaccaattccctaccctcaaggagctagtgtattagaagacatggtgtgtaaatggacatatatattcaacgtaatacatgttgtagaaatataggatgccaaagtcgttcattagaaaagactcctacttcagactgaggcaaagccaggggtgtcatgagtataattgtgctccctggaaacatatgttgaagtcctaacttccagtagctgcgaatgtgacctgatttggaaatagggccgttgcagacgttatcaagttaagataaagtcatactggattagggtaggccctaatggctggtattcttataagtggagagaggcttggagatacacagcatatagggaagaaggccacatgacaatagaggcagagaatgaactggtgcaactccaagccaaagaagactgaggatggccagcaaccaccagaagcaaagaaagaagcaattccttatttcttagggctttcagaggaaatatagccctgctaacattttgatttttagatttctatctccagaactgtgggagaagccatttgttttaagtcactcagtttgcaacattttgttacagcagctctactaggaaataagtgctgatggtgactgaggaggagaatactgagttgaggagagccccttgaaatgacatccatcgtgttacaaaaagcacctggttgttctgggcacagtgagttaggaaagtgagaagtctgggttcagccaaccggggagaatggagggtgctggccatggtgctgatggagccattgagttggcaaaggtagctgggcaaagttgagaatcacgagccggatcaaagctacccagaattcagagggagttggatgatcctcacacttcctccttctctctctaaattctctctcttccattctcctcttccctcttctaatcaggatgctgtagatcttgatgcccatcccccatcacctgtaatctatttctgcctctggtgaccacgtttctgtgatagagacacaacctcttcagggggtacatgcgatacttgctttctctttcatccaccctttaaagaacgttaaaattgccttctctcaggatttcctctcatccactctcttttgcttcctgtctcccctttctcatgctgcaagaaaaatcaggccaaaaagctaaaaaataaaaccctcgtctccattttatcttttcttcagcacagttgttgtttatgaagtttttaaaatagaaattcagcaaatcccgtgatactaaccagatactatatatacatacatgtataaattaaattagtctccaggggataccctgctaaatatagtgattatgtgaatctgaatgttttcaaacacctttctcctcttgctatatttttcccctttcctggatccggagatggttctgctggaaaatctgggtggaaccttggctgactgactaaaagccttccttatttaagaatacacttctataagaggcaggaaaaaagctcagaattcaaggggaaataatggcaggaatggctaggtgataaggtcagagacagcatggagtagttgatagagtagctgcaggttcaaatcccagcaccattacttattgattgtgtgatggtggtaaaatcctttaccttcttacagtctcagcattctcaactgtgaaatgggggtattagggttcactttgaaggatattttaggaccagggatacatatatgcctaggagatagtaggtgcttgtaaagtggtagccattagtgtgattagactgtgaattcctccttggctgggaagttcatgacctataattctgttgggttaatgaggatagcaacctgcaggggataaggaggcctgagctaatgggtggaggacccagactctgtgttacagctgctcagacctcctttttcacaaatgagaaaattcatgcccaaatttcagaagtggcttggctaaggtcaaggtcatcacacagccaagatatccagtttgccagtaaaagtccccatagggtcaccagttatatggtggcattgtgtaacttctttctgaggagtatttacattttacatacaaacttggatcaagttcaagccttgggtctgtccttgacctctgtcccttaaccttaaacaaatcacttatcctctttcagttccagttttttttttccttcgccttcacaagggggattgtcattattgccatgaatgtttgtgaggatcagagacaatgagtctgtggaactatcaagaactatacccaggtaggtcattggatctgttcttttctcccaggaggagaatgtcttcagcagtgagaaggaggaacctacttggggcaagaggggaacgggctgtcctctcaccccctatggtttaggcatgaatgtgcattcctagatatcctacctgtccctgtaggaaaagggttgtgttctcatcatggctctgtatctggcttactttgtggtctgaggtcactttccctctcctgtgtttgtatgcatttatttttaatatatgaagggtagtgatggtgggatcagatgatctctaaatttgtgagcatactctcctgctgctgaagtcagtgctgctcattctgagggaagggcctttatcttcttgggattgagacatttaggcttattctagactcctcaccccatctgcttggtgagtctactggaaggggtgtctgaaactagacacctacagtctcccaagtttcccagctcattctgtgcttctcaagtggctggacttctggcctcttgcaggactgcagggaggctgctggggaccagcatcccacagagtcagtgacaaaccaggatcagaagaataaagtctgcgtgtattgagccagtctctgtacacagacattcaccacgatgagtcctcatgacaccttcgggctcagtcatattggcttcattttacagacaaggaaactggagcccatgcaatcacattattggaccagaccacacagctcctaaataagaggctaagccagcattcagacctgtctctacgactctaagtccatgctctttctaatactcctttttcctatccttgctgctggcctctcctgcattgtgctcttgctgcttctagtcctctttccctgcactgtcagttctttctttctttctttgtggatgggtttattctatttcataaggattgagtcataagaatagacttgcaaaggacctgtggggtcgacatcttcattttgtcaatgaggatcctggggtctagagagaatcctgactggcctagggtttgcaggcagttcaggacagaaacaaacattaagatccaggtattgtgctcggtgtgtttaatggactatcttaggtaatcccttagaccaggggtccccaacccctgggctacagactgatgcttgttatgaaccgggctgcacaggaggaggtgagtggcgggcaagtgaaacttaccatctagctccacctcctgttagatcagcagtggtgttagattcttctaggagcacaaaccctattgtgaactgcacatttgagggatctaggttaagcactctttatgagaatctaatgcctgatgatctgaggtggaaccatttcatcccacaaccacccaccctgccaacccagttcatggaaaaattctcttccacaaaactggtccctggtgccaaaatggttggggatcgctgctttggacaacactactaaagtagacgctattactaacattgtccacataaagaaactaaggctcaaagatgttaagatgttacatttaaggctgcacaggcttaattctgcagtcagaattcttagtctgtttgcttttgctcttaaaaccacagctatttcatgcttttaaaatcatagctatttcttgtttactctgtgggctgctgcctcagtttcttctgaataattagtttctgaaacactaaaagcatagaattgaaagactttttattctgctacattttttgggcctgcacttctgcacaggtctgtgttgattcatgagtaaaatataaccctttgttatgtcacataatagtaagccaaacccatatgttaaaaagagtagctaatatttattatgcatttctatatacctgatagtgtgctaggtatttctacatggataatatcatttagttcttacatcaacctattgttatccctattctacgatgagaaaatgaaggtttaggaaaggtaggcaactgcccgtagtcattctgctagaagcaatagagccagggtccaaactaggcaactgcgaataggacaaaactttcttaacattgactgcacatgaacatcacctgtggagcttttgaaaaataggacatcatacccttccctggaccaactgaatcagggcccctggggcatacatcatagaacattagtgttttttcaagctgatcaattggttctgattttagcagtgaaggctaaaagctactgctttacctgcagaggattctttacatctaaatgatgatgcctagttgaccaagtggtgcctgcattccatatacccgttcgtgttatgaagattaccttggcctctgactcccttcttggtgccagggaggctaatactagagctacttgctaccagcgctgccttacagaaatacaatgtgagacacacatgcaattttacattttctagtaaccctatttttaaaaaagttgaaagaaacaaacaaaattaatttttaaaacatgttttatctaacccaatatagacaaaataataacatttcaacgtgtaataaacaaaaaaagaatcactaggaccctttacatttttattttttggtatcgaatcttggcgatctggtgtgtgtgttgtatcctcacagcatgtcttatttcagaccagtcacattttcaagtgctcaagagacacatgtgctagtggttattggattggacaaggctgctttagatgactatctctggcttttgtttcctcttctaaagtctcagattcacggccaggcatggtggctcacgcttgtaatcccggcactttgggaggctgaggcaggtggatcacctgaggtcaggagttcgagagcagcctggccaacatggtgaaaccccgtctctactaaaaatacaaaaattagctgggaatggttgtacatgtctgtagtcccagctactcaggaggctgaggcaggagaatcacttgaacccaggaggtggaggctgcagtgagctgagattgcgccactgcactccagcctgggtgacagtgtgaaactccatctcaaaacaaaacaaataataaaaaaacaaagtctcagattcatacagaaattatagcagcatgcctaggagaggccttctctcattgaatttttctggccttccaggtgccaatctatcttgtaatctatatgtagcatgttcaatctacaataatcaatctctggtctcccaaaggcccattgcctcctgaggaaggaattggccttggggaaccttactttggcagggtgattggagactggccatccttcttcatgctcctgcctttgtttgtttgtttttaaaagtaaaatgtcttgaagaagcaatttggtgatataaatcaggagatataaaaaaatccattcactttgaccaagtaatttcacaaggaaataatctgaaatatggaggaagtttcaggcctagaggttcttatccgggccttatttatactataaaataattggatacaatccagatgtccagtgttcatatgatgattccaaaggctgtgggaaatcatgcacccattcaaaataacatcagagagttatcataaagagaacttcttatggtaaaatatgtgaagaaaagagcaagcaccaaattgtttgtgcagaattataagtatataaaaatatctcaactcagaataacagcaagagaatacaccaaggagtttaaagtagttatcttttggtggtatggtgatgagcaatttcttccttctttttttctacttctctgtgttttttgaaatacagtgagtacatattcctttcataataaaataagctttattataataaataaacaatgttaaggacaaaaaaaagcaattaaaaactttccactcttgcatgtgattagaaaatcatctgcctgtgcctataggctccaaggggaggagaaagggagaggaaagaggaggattatgggtataaaggctcctgtcccgccagggacagatttgcattttgcacactgatacatcatttctgacaatttggaaagtctttccccagacccctggactggggctgctccttaaacaaaaagccagtttgtgaggaagatgcctcttcagtggtgttggcacaacaaactctttcttcagcctggggctgcaaaatggatgcattcaatgccctcaggaagggactggacaaggaagctgctcagttgctcaaagtctaaaattaggtgtcccagaagcacaactattttctcttcccctaaagcagcagaatccttgtcttaggggactgagtttgaaaccttcaggacttccagagtctacatgttccaaaagggggcctccaatctctttatttcacaataagattggaggaggaagctttcactgaagcaacttatgaaagaggtgctaatgtacccatttcatagataatgaaactgaggctcagagaggttaagaaagtcattaaaggagtgaggggcatctgtgggattcaaattcaggtctgcctggatccagagctcatgcatgtccattgtgtgacactgtttgcctcctcttctcctacttctctctgcagcggcttcaggtgtgggaagagcatcctagaagatagaaaactttgctgttgaactggcttccagcatggaccaactgtccttttgtgaccacagccatctagtctgtcccaaagagaccctatcagtaatgtgtcatcctcaagttgagaggaagtttaaccaaagagggcattcttacagaaagggagtatctttagctctcacagaagaggggagataggtaatgcaattggtcagggttatttagaatgcaagcaactgctcctccttccaagatgagcaacccaacccaagaccacatgatggcttgtgtgtcatcctctcttgacatgtactgacaaagggtcctgtgtattccacaggtgatgggggtcgtctttttgcaggcaagcgcaagactaatgatgctttcagcagaagatggaggaataactaaggcaagctgcaaacgtgcaagctgtcagtgtgattcacagagtaattacagcataatacagtgtaaagtattaggagataataacaataagtcaggattgactcatcgctttgaaaacttggggctgatgaacctgccagttatttgctagttctcaaagtctgtaaaccagtgtcatgtgagccaatcctggcagctggattcaaaagagacaggtctattatccctttttacattaaattgtgagaatgcagcaatgggaaaatagaaatgcaagcagttaggatagcattagcgctagcgtccaggtaaaatgataattgtcaggcacttaaaatccccagaaatgatatgctcccagtccactgaaagctacaaacaaacccaaggcataatgatggacttgccttgttctaactagaaggaaaacaaaagtatagtaataatgaaggctagaattgctgaagtgcctactatgtgtcaggtaatttacatatattccattccagctaatcctcataaaatagtaggtgggaaagcttagtctcatttgggttgaagaaactgtgctttagatcatctaagcagcacagggaatgtcgcagagattgtaagtgtgggagatgggtttcaaacccaaatacaatgggcttcaaagtataggcatattctaccactccaggctgaatcttaggaggtagaagggtgagtcaataaatccatatgcgtggggacttacaggagaacctacacttgtgagggcctgcaaaaggaagcattccccgtggctaccaccagggtcaccaagtggatggcagaagcaggtccaagcagtggtaccacagctgagatgctgtagccacatagtcatgaacgtgaggatgtccgaggtcagaatcattgctcatacacttgaggagcacttacaccatgttagtacttggggccacaagggtgaataagactcagtccttacactccaggagcccagagttcagccttccagctccaatcgcagacacacaagtgctaatagactcacaggaggggaagggattaagcagcagaatctcctttgaataggggtgatatttgagtctccatgcttgatttctctcaccctccccttctccctctgtccttctgttcagcaaccccaatcctgtggaggggtgaggggctggggcagaagtggtcttggagagtcacagaccttggtctgcctcctgggtctgcctcccagatctgctgcttgttctgcttgggactttggatgctcccctcaccccaggatctctgaattatttcaaaactttaaaagggggtttagactctcagtatctctaggccagtcatttattccatgactctctttagccttccttcagagggaagaggaaggggcagtgtcaagccacattggaacctgaagcaaaaggagaaatcactcatactgatcccgtctctatttaaaatttggatgaccatgttcatcatgaatttcttaacagatttttttttaaagtactgcactaaaatgttgtttattttcgttgctgaaatttttggcacccctgaaattttgcgtctgagacaagtgccttcctcgcctcacactttttccagtcctgcggaaggaaactgaaatacatgagcacctactgtatgcaaggtaatttacagagattccccagtcccctgttgatcctcacgacagctgtgtggggagggtatcgtttagtcccattccacaggtgaaaatagtgaagttcagagaggttaggcgagttgctcaaggctgcctgtgtctggcggtgatcagcattttccaaggctctgtcagaaagttgaacactttctctctctatctctgtctttctctctggctagactccgactgattctacaaaacccggcccacttttgattatagcttaatctgtcagagaggagggggcggggcttctgttaactgatacaaaaaggagctggagggtcagctttgtcaatgcgctcgtggcagaggacccagaggctctgaatctacacaaatggccttggttcttgaggcagaaatattcctagagcagagaagggggattcatcagggtgcctgggctgcgtagaaatatctccagagaatgtccagctccgtttcttctaatttgggctctccaagcaccctccagagctggctttgtgctcctgggggtcctgccccctcacagagggccttggagataagtggccccagggtgcctgcttggttctgactccatttccactgtgtgggagcacactggcactccagtgaggtagcactgacagaaccaaaaagtgcttggactctgcatctaaaagacctagtttcaaatcccagctccaccaattaatagattaataagggctaccattcattgagtcctgcctgagccactttatatacatcagctcattgatcctcacaaggatcctacattttacagatgtggaaactgaggccctgaggaatgttgttgcccaaaggcatgtaatagtgatgacaggatgaggattttaaccttgcggtggtctgaatccaaagtccttgctgtgcttcctccaagccctgtgacctggtgccatttcctttacttctttgagcctcagtttgctcaactgttcaaaggggatagtaatgcttttagcattcttgtaaagatgtaatgagataattcgtttggcaaacattcattaggtgtttgctctgccactggcactgtgctaggcaaagagggtggagatgttctggaggggcaaggaggatggagatgtttctctgagatgttctggaagggcaaagagggtggaagtgttccttctgaggtgttctggaagggcaaagaaaatgtaagtgttccttctgaggtgttctggaagggcaaagaaaatgtaagtgttccttctgaggtgttctggaagggcaaagaaaatgtaagtgttccttctgaggtgttctggaagggcaaagaaagtggaagtgttccttctgaggtgttctggaagggcaaagaaggtggaagtgttccttctgaggtgttctggaagggcaaagaggatgcagatgtttctctgaggtgttctggaagggcaaagaaggtggaagtgttccttctaaggtgttctggaagggcaaagaggatggagatgttccttctgaggtgttctggcagggcagggaggatggagaggtttctctgaggtgctctggaatggcaaggaggctgtaaatgttccttctgagatgttctgtaatggcaaggagatggaaatgttccttctgaggtgttctggaagggaaaggaggatggtgaggtttctctgaggtgttctggaagggcaaggaggctggaaatgttccttctgaggtgctctggaagggcaaggagaatggagatgttcctttccattggcctctcatggagtattgggtaagacaggggagacagtagaattctggaagaagtgtatggcagaggttagtgctgggcttgtgggaggaacggcagaagtgggagaatcaggggtggcttcctggaggaggtgatatccagcttggatttttaagaaatgaggagaaggtaattccaggcagatggagcagcatgcaaatcacagagggaaaaaggaacaagatgtgtgcgtgcacgaatgatcagaggtggaatggctacagcgtgcattctcagcaggagggagagctgatagcaggacaaaaaaattgtcttttggggtaagaaggtaaacgatcttagacattcaatgatttgtgggtctccaaagggttacagtacacaaaatggataagtagtgtatctgtgacattaaaatttcttgggtggataagaggaaaaagctgtctaaaaagactataatatagatgaaccttaagaacactatgataagtggaaataagccagtcatagaaagaaaagcactgtgtgattccacttatatgtagcatctagagtagttgaactcatagaaatggaaagttgccaggggctggagggatggatcaatgggaagctatcctttaatggatacagagtttcagtttgggatgataaaaaagttatgggggttggttgtacgacaatatgaatatatttaacactactgaactgtacattgataaatggtcaagatggtaaattttatgtcttgtgttttttaccacgataaaaattaagttaaaaaaaaaggaaagaaaaaataaagcctttgcagggggcaacaatgaagaaaaggttgagaaacacagggctggagcacagggtgttggggaaggttggcttcaccctcagatgagcttgggaaggagagtgaggcaaagccctgcaagatcttgcctctcatgctcaatagactgaagtttcagttctacaggtctgggggcagcaaacttttcacgtagatatttttggctttgtgatccatatgttctactcaactctcctgttgtagagcaacagcagcccttggcaatatgcaaatgatgggcgaggctgtgttctaataaagctttatttacaaagatagatgtagctgcatttggcctgtggatcataggttgccaatccctgctattccctaggaaaatttcactcagggaattttgtttatattttaaaaagtcactttggcaatttatgcaaagactagattggagaaaggagtgcacagaaagggcccggcacggtgtcttgccctcagaaaggtggggtttccttttcttccctcatgccaggcagtgccttctaagtgggagtagaataagttgtctctctgaggctgcctcctctttctgaccttgcacaaaccaaaggctgtgatgactccctaactcctgacatcccaggaaagtaggagctgtaccactttgacatctttttagttgcagcaaaaagagataaaaccagatttggcagtggtgacacttggttgggtatctgatactttgctgtaggtcatttgttagcaaaatccatcacccgaccccaactgctgcctctgaccctgagtcacctcccacacacccctgcatttcatagctttgattcattaactccaactgctggaattacaggtaacactcagagttgcattctaagtgggcaaggatggctgctttgaaagtgggctttctagaaaggttaatattataaatacatcttaaatgcctaatacataaccaattgccacaaatgtggaaatgtcagcagcgttaaaactcagaaagcaagaaagaaacaggtcacctttgctcttggtatattgtattttcaactgggctggagaaatgcctttagtctcttggagcagtgggccactcctggaagctggagtgggccaggaaggaaaagacctctgagggtgatggggagtgggagcatgatgagagaccagtctcttaagctgccagagtgttagtttcctcagatgcaaagtagggatgataattataataaggtccagaaagttcttaattaactacaaatctaccataaatgttggatactgctctcttttttttctagcaactaggtcagcgcttggcacacagcaagtgctcaataaatgctctttcctatcgtttttcttcccataagccttgaggttggctaacattagtttagacagatacgaaaatatcagatatgacctccctcaggtgtgcttgggttttctgggagatgatgttaaagagaaacttttctgagatttgaaggagaactttgagtgtatcagtggtttagggagggaggtgcttataatcctcaaattagaccacagagggggctcctgcatcatcaaacgggctctgtatatgtgtgtctctgtgtgtgttggggcagcagagtgtgtgagcaagtgctgtgtgtgaatgaatatgttcacgtgtgtatggatggatatgccagggctagtatgaggcctgcgaggtgtccagggtgcatcatttagggaggaactcactctcagggaatgaccctgtacttgcatgagcccaagagttattgcctcctggaatgtagtatctttcacacctcaccctagtctcagacttgagatagtcatgtgtggatagagaagggatatcatttaaactgcagttgacaaggaagagccaatccccttgtcctaaagagccttccaaaacaaggatgaatttccttaagttttggatttgcagcgatctttaaggtatccaatccagtggtaatcaaatgttagtgtgcatcagaatcaaccgaggagcgcttgtgaaaccttcacattcccagaccccatctccaagattctgatttggtcggtcaaggctgagggacctggaatctgcatgtttaacatgaacgctttccccattccaggtaattttgacatgggctgtccaggaccaaccatggagaaactcttcttagaattggagtgaccacataattcatcatccaatccaagccactttggagagtgaaatgaatttgttgtagtttaaatcaggagttggcaaaccgtgactgtttttgtaaataacattttactggaacacagccacgctcatttgtttaggcattgtctacggttgcttttaaactacaatgctagagttgagtggttgcaacagagaccccatgacttgcaaagcataacatatttattatctagtcccttacaaaaacagttgtcaacctcaggtttggattattattcagtaaatatttacccccatacctagtagctaccttaactatagtttaatcttcctttcacttagaaggatcttgaagcccagagtggttagagtttgggcaagcatattttggacaatacttggatgtctcattctaagttgggttgtggatacacagttgagaaacctctaaaaggatgcctagtggctgttgggataaactagagggggctctgaggaaggttgggttaagttgaaggtttgccctggctactgatgcccctttgtcattctcagactgacactcagacctaccttagactgacatctcttgagatgaatgctccccacccactcctgaacaaataaatagcaagaaaatgcaaacagagggaagtcgcatcaagaataattacagagcagtcacatattttgatttaaacttaatgttgcttagcaaaagagaatgtgctgtgaacaaacagagatcaattcacaccactatcaagtggcaggtggtattagtagaagatggccttaaacctctctgggagcctcaacaataccactcacatggtgcagaaggataaggtccctcccaggaggctcctcataaggaagttagcaaaggggaagcagccacttgtgaaatccttactcattgttagggctttgaactgcaaattggctttttgtggagagtcgagtgtgtgtgtgtgtacatgtgtgtgtgtacgtgtgtgtgtgtacgtgtgtgtgtgtgctgacagacacatttgtgcaggtttatgtgtgtgtgttttgtaagcatgtggttcttgtgtgtttgtaagtctatatgagttcacatgtacatacatgcatgtggtatgtatatgattatgtgcatgtgtgttttctattacctgatgttgctagggcctgtcttcttgcctgctgtgctcccaatagcctgaccattcctgggggaatcacatgatggtcctactctccattgactaagtccacattatgacacgactgattattaactctcaatccagtctgcttagcccccaactctggtttgggggcttgcaagatatggaggtcaccttccttgatgcatgcagcctcatcggatcacttttgcttatctgatgatggcagagtttctgggcaaagctcagatcttctccacagctgcccctccacacctcctcattcattccagattgagtttgccttggtggttaatccccatgatgctgttccatcatccccttcaggaatggccaggatagagccaggtgggcagggcaggctctagggactcggttggatgggcctccaatgctactcaggtggaccagaagcatgcacatccaaggggcatatgtgaactttagctaaataggtgagctgaggtcagcattcagaagtagcttcaagcaacaggtctgaaggataagaggaaggctaagtctggtcagggaataggagcgagcaatcctcattccaaattgtagcaggagagaggcaaagcagacaaagacaaaaagctgtgagcccctcggagaggctgagagcccagatgggtcctgcccaggtgatccagggccaggacaacccacttacacgttcagggctagaccaggctgacctaaaaggctctcctccaggaagcttcccctaacaaagtccctttattcttctacactcagaggacttctgctccctcttctaatcctctctgatgtagttccgtgattcttaatagattccactggcttctccaagaatttgcctaacttccttggacacttcctcgcctctggacattagctgcttatggtccaatccactccctgatgcctgtcattggcttcctcactttattactggttttcgcatgtgtccaaatcttacctctctagccagactaaaagctcccctgacatggggggagtctacggcttgttttttcctatgccattcgcttgtatgtactcaagccatctcttctaactggtgggttgacatggctttgggtatcataaagcctttcgtacatgagagactttcagcctcagccttattttcttccctctgcattttccagtctgtgttcacttctgtgttcacttccactccatggcccccaggctcagccctgcctaattcttgaaccaactctggctcctctcattatcactacccccaatctgctcatcaaaatgaaatccgatctcttctctgtgtgaaagtcatgggggaatccccacagaagcccctgaaaagcgactgtgcctttgcccagactttgtcccgtctacctggaccgccctgtgtcttgcaaatattcaccatttgtcaaggcttgaattcatcacctcctcttcgaagccttcccagatacctccaggctgagttgcgtgttccagcaactgtcctgccctgacgtgagtctcagcttcacaaaagcacttagcacaacatggcgtcaaaattgggttaatgtccaacttccccagcagataattggttagttgagggcagggatcatgtttcaaccatctttgtaattctctgtcatgcattccccagtgcccaatacagggtggatgctcagtaaatattttgaatgacccccaggactggttgctagaggaggccagcttttctctgaagcagggggagcagatgcctgttgtcaggtggtcattggcagggacgtacagatttggaaaatgaagactcttcctgcagcagcatccaggcacatacaggccagttggctgtcatttttacctggcagggagcggggcaccaggaatgtctggagcagatagtagcttcctgggacacgacaggtggaatcagcttctagtgaaggaagaacctggtcagaacaactgaattataatcctgacctggccacttaccactgcatagccccaagccaaggatttactctccctgggcttcagtttccttgtctgtaaactgaggctaaaaagtccctgtcttgcagggtgggaatgaaagttaaatgagatagtgtgttgaatcagtgttcacagggcttccttgtttatagtagatctctctgtggtctctcctcccacttaaccctgctcacacattttttcaggttattaacccactactttaagaatgtatatatttatttgcatctgggagacaggccactctttggggacagagaccatgtcttagctctgtattcttggtgtctggcctatataggggccaacatttactcttgaatgaatgaatataaatggctagttgggagagtcatgccactatatatgcaacaaaaccttggtttttttttttttagctggggacagcggcttgaattaacaaaccaaaagaacatttctaaagcaaaacaaacaaagtttaaaaagaactttccaatttataagccaccactggaactcctgactaccaaaatgtttccagatagaggtcttgccaagaaggctgtcatgtgcagataaggctcatttgtaattagtaagtgtccatttgcattcaaatgcagtaaggggctccagttcttaaaaagaatctgttctccagagtagtctaaacatgacccatgcaatgtcagagattagcagtttttccccttagtaacattctttggtgcatttctccaataaatatttattaagttctttctgagtgtcaggtatgattcgaggcactgagaaagtaccgatgggcaaggcaagatccctatcctcacatatgttatgattcagtgacaggagatggtcaataaacaaataagtaagaaaaatgtgaatggaaaatatggggggcctatgcctcttcttggaggctgggctcccttaagaaaaaaaagacaatatggagcagagatttaaaacagggtgatgtgcttgagttattgggtggctgcttttgattgggtggtcagaccaggagaagaggaaatcccaaacagagagaaaatctggtacaaatgctgtgaggtggaaagaggtttacatattcaagttgggaacaaggaagaagacaaacgcaaatgaaattggcaaggaaagcaaagactgaatcatacagggcattatcattcctggggaacagattctggatatggttccaagggcaacaggtaggtttaaatgggagtgatatgatctgacacgtctttaaaaagatctcttgggtgcttgcatggagaccaggaatgaaaggcaccaaaaatgaaagccagagaccagttaggaggtaattccagtagaatgatgagaaatgatggtggcttggagtaaggtgttgacagcagagacagaaacaaggaggccaggcgtggtggctaaacacctgtaatcccagcactgtgtgaggccaaggtaggagaatcatttgaggtcagaagctcaagaccagcctgggcaacatggcaaaaccccatctttactaaaaatacaaaaattagtcaggcatggtcgtgggcgtctgtaatctcagctacttgagaggctgaggcactagaattgcttgaacctgggaggcggaggttgcaatgaaccgagattgtgccactgcactccagcctgggtgacagagagagattccctctcaaaaaaaaaaaaaaaaaaaaaaaaaaaagagagagagagaaaaggaacataaagacacctatgtacattttccaatgtattttggaagcagaatcaagagcctttggtgattggttggctggaggagagggcagtgagtcagagaggagtagaagggaacttcaagatatttaatttagcttgtgtcagcgtaacagtggtggtattttctgagatagaaagaatcgggtggggtggatatttgggattttctatgtgtatatgaaaatgcgtgggtatgcacacctgtgtatgtgtgtgcacatgctcgtgcacatgtgcctgtgtggtagaaactggagtattctgggatcaagagttttgctctggccacatcaagtttgagatacctgttaggcatccgtgcaaagatatcaagcaggccactggatatttgcaacttgagctcagataagagattaaagctgaagatatagatctgggagttgtttgcatgtagattactaagggaaatgaacatagataggaaagagaagaaccccagactgagccctgaggtgcttcaatatttggagtttcagcaaagaaggaagaacttacaaagaagagcaagaccgaggagccagtgaagtggggatgagacctgaaagtcaccaaagcctagagcggaaagtgttccaggaaagagcaataggagggggaaatgtggacagtacagacaccttttcaaaaaagttttgctgtgaagagaaatagacacggagcagctgctgaagagtttgatggagtgtgtgtgcttcatacagatgatttggaaagacctttgcacaccaaaggaaatgatgctagaggaaaggaggaatggacggtgagtgggaggtggaattatagaagcaagctcttgggaaggaaagatgaatgggaaccaaaacacaagaggaggggtggcctttgaaggagtggggacacttcattcatagagacacgaggaaaggcagagaagatggattcacatgagcatcttttcagtatggaaatcttagagagtgtctacctaattgcattcaagtatgtgataaggatcgttgctgttgcctctgagtatgtgtgtaagtatttttgggggaagggtgcaggagtttttgagtagagtaaaaggtatgaaacagtcgttacaaagaataggcaagtgaacctactaggagagtgtgtaggattgccaggcaacaccaagtgccggtttgagtcttctggccatgaatttaaagttagacaaataaatgtgtgtgggaaagaaattcaaagtgtttggtagagagtgggtgttaggacaaagcatatgatcaaagaaagattctaagaagggtcctgggggtgagatgtataggatcactaatttaaaagcccggatgaggtctcagaattgctgaaacagaaacatcgaaggagggtgggggctggtaggatatgaagttgtcatcagagcagatacttaagtcaacatttttcaaaggtgatgcagtcattggcaatgacaaggtcaaaattatgaccatgggtagcggaggcagggtgggtaaaaatggattgttatgctgggcatggttgttcatgcctgtaatctcagcactttgggaggccgagatgggtggatcacttgaggccgggagttcaagaccagcctggccaacatggtgaaaccctatctgtactaaaaatacaaaagttagccaggcatggtggtgcacacctgtagtcccagctacttgggaggctgaggtagaagaatcgcttgaacccaggaagtagaggttgcagtgagccgagatggcactgctgcactccagcctgtgtgacagtgaggctctgtctcaaacaaacaaacaaacaaaaatggattgttggaggaaataaggtcaacaaactgagaggccaaagcatggatggaccttctacgtggatttagcagtcgctgtgaatgatgatagaaatattaggacccaatgagactggtgaagggggctttgatccaggtagaagcaacaaggagttctaggtggtggaaaacaaaggctgatgacactaacttccaaagaactctgcgtgtgtatgtgtgtgtgtggaggagatatatggttaggaggccacaaatgggagcaagaagcagaacagcaaaccctctttaaccctagattacaggcacatgagagaaaaaacatctccactcacgagttgcaggtgatgctgttgtctggaatgggcttaggacaagaacctgaaaggaatattcagggaagggtggtagttgttggggtatttgctgcccgcagatcatgagcttcagagggcacaacaccagggtgagagggttaggaaattgggtgagattagggtgcatggagcagtgaggggatgaggctttatgatgatggacactgagagggcatgggatgtagtggggatctcagctgaacagaggtgtgggactgataggattgggcctgtgagtcccttgggagaagatgggttcaagctggtctcttctctcctgaggttgcatagtggtggtcaaaggggtggggtttaggtggtaccttgtgcaaaaggtaccacctaacctagagcagggatctcatgtgtccccagcccagaccaccgaggtcaataagcaaagcaggctgggccacgactgtgggaaacctgatcggtgcttcccagtctccaacaggcaaacaaatccactagggatcctgtttgaatgcagactcttattcagtagctctgggattgatcccgagattctgtgtttctgaaagtgctgggtgacactcttattactgatctatggaccacactttgagtagtgaagactggagagtctgtggtctgctgaaaggagcggctgcttctcacctgtacctattgttgtcatatgagagagaaggctcactatggtcttctgatttctgaagagaagccagaaatctggatttttatgtaaaatcatcccatttaagaatattggcaaataattaaaaatgtaaaatgctctgtggaccaaataaaacatgtgtgagggttgaattctgcttataacaccactgcttgtgatttctgatggagaggaatccaggcagagtgagtatcaggtgagcactggactggggtcagttattatgggtcacagagtcagcttggcctttggcactagaggtcaccattcgtaaggcaccttgatgttgaaaaacagttctccaggcatgtgggctgatgccctaccaggccaccttcattcttacctccccaagaactttgttcttcctgctcccctcatcccgaatgccctccagctccacccaaagccgaatctatcccactgactttcaaagtggtttaggtggcagagtgcctggaagcttcagttttctttgtgaaatgccatgaaatattgacatatttaattccatcactcataccagaaatgatttttctagcaggaaatacagctgtattatatgtactcaagtctctgcaactcaaaaagaaaataatcacacataaaatattttgaagaaaacacattcctggtttcccattagcatttattcccacttgtttcattctttgtgtcacttccagcactgactagtagataagtggtagtcggcactcaaaatttaagaacaatttatgaaaaaaaaagccttgatatagagaaagtatctattcattaagctaatgtgttctgggaattggaacttcttttattctatttagtggtgaaaactctcagtcttccttgtgggatggtagtgttccaagaaagactgggccgacaatttgcccatgtcttatcggttcttcacagtcggtggagacccaccttccctattgagtctccttggattctacctgttcctttttatcatccatatgactgaggtgctatgccccaaacatgtatttatttcctgattacatgtcatcttaggtcggtgtggcatgtgtctatgccttgctgcccagacataagctcatgcaggctgggactatgtcttgcctctctgctgagccagcaaagggcaaatagcagcctcaagactagcaccctgtgttcacgatccttgggcattttagagcttttctgaatcacttaatttacttaatcactggccaggcacggtggctcacacctgtaatcctagcactttaggaggctgaggtgggtggatcatccgaggtcaggagtttgagaccagcctggccaacaggacgaaaccccgtctctactaaaaatacaaaaattagctgggcgtcgtggtgtgcgcacctgtagtcccagctactcaggaggctgaggcacgagaatggcttgaacccgggaagcagaggttgcagtgagccaagattgcaccactgcactccagtctgggcaacagagcgagactctgtgagaaaaaaaaagaaagaaagaaagaaagaaagaaatatttaaccactaacttctctctgcatctcaggacctcagcaacacctaaccttctatgagtcacagaaaaactaagaatctgatgatcttttagtttcttgttgcaaaaaaagaaaaaaaaagcccattcatagaagatagcatcatagtatcagtttaaaaaaatccctgaatctctctttccttagaacgatctccaggaaatgtgatctctttctgttctaacattttgggattccacagcatttcctcatttcctttcgtgttccatctctgtcctgtcttacctctcagggagaatcagctaattctttttctccttgatgttcttagtataaggactatctagcctttggtgtcagaaagcccttgagttgcttatcaaatatgtgacttgacaaggtacttgaattctttaagcctcagtatctatgtcaggaaaatgaggataatactaagatctacatcatagaatgaatctgaaggattcaatggtatttggcccccctcctcccctcctcctctctgactgcccctccctacttccaaaggccccctttctgtttggaggctgacttggtgttggcacagttccaggtctaagcaccatgagcagccccactgtgaatggatggacaagaggtccaagctggccttaggccagacgttcatctcttctcatgctgccacattaagccattcaggaaacattagctcccaggttgagatgtttccccacaggtctaatgatttcccatcttctctcatcagatgtgtccctatttacacagcccccaggtacagagcccactgggcacttttctccatgggatactccctcaaagtgaatccctacctctcagcagcatgctcctctcacacatactgtatttaggtctcatgttttcctacctccaagctgtactcgtgattatgaaatgcttgattgtggtgcctgtcgaaatgcattcataatgcaactttaagtctcacagaaaattttcaggggaaattaaagccttgggaagaccagcaccctgtgtttatgattcttgggcattttagagcttttctgaaggttttctttatccttgcactcagaacagggaaggaagagacatgtagatgtggcatggagtgctgggggatgaggatgggggagtcggaacctcttggttctggccctgccactccccagctgagactgtgtgagcagcagcaagtctaatgacagctcaggtttttagctgtcttcttccttctgcatgctcaggactcaccgcctgtctgatgtctgctcctcagcctcctagatggtcctccccttgagtgttttgtcttgtgtcttcatctctttgcttcctactccctgggttagcacctccactcccacagctacaaatgccacccctctgagcatggttcctcagtctctatctgtagctaaaatctccaacttcttccatctgaatctcgactttacctggatacctggcagggacttcaaaatcaacatgcccagaactgaactcacactgcatcccactccttccaggtcacccatcttggtgactagccctgttctctcctcaggcacaatagtccagatatctcagaagtgcccagtgagccccctccatgagatgcacttgaagccagcccattaccccccaaggctgccaccccctacatgggaggcccttcttaccttgtgcttgcacctcttactaatgatgaggcctgggctgactaacatggctctccctgcttttgtaaaatgagaagctttagagaagatgatctcagaagacccttctgaccctatctgtctttatttcagttatcatccatcgaactctgtggctcaaaaccttgcaatagtcttgaccctggattgtccaaaccaccctcccaactttgcaagactggagaaaatcctgtgatgttctccatgactgactcctgctgccttccttgctggcctccacaccaccctcatgctttcagtttcagtgtgcaaggtgcatgcacctcaacactcagcaggtcctcacgttcacctgctgcctctcaggctccatcctgtgcagtttctcttcggctgttagagtttctctccctctttcccttcctggccttctctcatgccccttaccttctctttcccatggtctgttgggtgaaccctccctcattcttcaaggttcagatcaagcctcactcttcacaatacccgaccccagagctaatatctgtagcactgtttcagtagagatgcaccaataacatttacccatctgcctctccactggattctgagctccttaagcgtcctgactttgcattcccagagcccagcacaatacttgcacaaaattcaggttcaataattgtattgtgattgaatggctccctaaatctataatattcaatctcattaatttggcatttttaagactctttccattccagatccaccaaactgttagctgtttcccttaaagtgcattttacttagacattcacccttccataatcatgcactgaacatgcccattgccgtggtgggaacttttgaccctcgacctctacctgtctcatgcccataagtctctatctattcttttttgtttgtttttgagacagggtcttgctctgtcacccaggctggagtgcagtggtgcaatcactgctcactgcacccttgatctgggttcaagcaattcttccacctcagcctcctgagtagctgaaactacaggtatatgccactgcacctggctaatatatatatttttaattttgtagaaacagggtttcactatgttgccaggactggtctcaaactcctgggctcaagtgatcctcctacctcagactcccaaattttggaattacaagcgtgagccaccatgcctaaccttaccttatttattctttaaggcccagccaaatgtcactttttcctcttcctattctggatccaggagtgacctcttcttcctaggagtcccataggtcttggaaccatttttatgatcctcagttctttgggtgttataatagagtgattcagtcaattaattcatctttaaatacatgttcttcagggctgctctgaccaagcacagggtctccatcaaggctatacttgccatgtgtatcttagagtattagcccattctcttgctgtgaataaagacatacctaagactgggtaatttataaaggaaataggtttaatggactcacagttccacatggctggggaggcctcacattcatgttggaaggcaaaagaggagcaaaggcatgtcttacatggtgcgggcaagagggcatatgcaggggaactcatctttataaaaccttcagatttggtgagacttattcactatcatgagaacatcatggaaaagacctgcctccatgattcaattacctcccactgagtctgtcccacaacatgtgggaattatcacaattcaagatgacatttggctggggacacagagccaaaccatatcacatgagtctcctcaagatctctaccaatggtggttcatgacggtctttaaatccactcatcctcatgctctccatccccactatgagccccctggaggagatccctcatctctcacctggaccagagcaatagcttcctaactggtcttctcacctccactgcagccagcatgaaatataactatgcaaatgtgaccaagctatcccccacataagatccttcagtgacttcccactgctcttgggatagaggcctaaaccctcagccaggtctattccaccagctctccctgcagccctacccccatggcttcctgcttgctctctgctttccagcagtgtggtccttctatgtgctctgggttccttcccactccagcctgggcccaggctcttcctctactgggaacattctttcttcagctttcccagggatctgatgggcccctactcatccttccagtctcaactcaacatcacttttgctcctggtttccactcctatggcagctcccctgtttatatgctcagcatttatcccagtttgtcagcctcctaggatgattacttgaaggcagagctcgtgtccttttatttaccattgccctctcccctctgcctctgtccccacacatgtgcacctatttccatgtccagcagagagcaggcacccagtacacatctgctgaatgcgtgctgacattcatgggctgcccttaacagactgggagcagcctgtgggcaggagatgcagcttattaatcttggttggaaacagcaagttgtgttgtgtccatgtgtgtaagtgtgggtatgtgtatattcggagtgctaattggtgccagataaaacaaaaagcaatgtggatcacctgagatcaggagtttgagaccagcctggctaacatggtgaaaccccaactctactaaagttataaaaattagctgggtgtggtggcatgtgcttgtagtcccaactactcgggaagctgaggcaggacaatcacttgaacccaggaaaggcagaggttgcagtgagccaagattgtgccactgcactccagcgtggacaacacaagactccgtttcaaaaaagaaaaagcaatgaagcccatgtacaggaatgtgagaatgtgagaaacagattcagagaagcagtctgggggtcaaagcccatctgagcaaaaaacagtaaagcagtgcctaggtttccattgcatagtgtcctgagaaattttctggagcaggatttggcatgggggtgtttagatgggggcgggggctttaaagacccaggctccttcctcccttttgaatttcttaaatgcacagcttttaagattgtaaattatttgattgtaaggagcatattttatctatcttggtttcctctgttcccataacaacccttgataaatagtagaagtttcataaatgtttgctgaattggattgactttatcctaatcatagcctgagccctggtaagatctgtttattcattcaacatttactgtttatctactattcattcattctttcaacattttttgcatacctactaattgctaggcaatggggctacagctgtgaacgaggcaaagtttcttgtttgctcagagcttaaagtgtaaggggaattgagacagtataatcagtactgaagtaggaatgatcaggggaaaagggatcccagagaagggtaaacgaacctagacctggagctaggggtagtggtcagggaaggcttcctggaggaagtgacttccaagatgaggcctgacaaatgagtaggagacaacccagagtaggggataagcgtgaagagtatttaagtcagagaaacagcatgtgtaaaagttagagaactccacatcattcactgattcaccaaggcaggtgtgaaggataggggtagggtagcagtgagtgatgaggctggcccctgagtgacacctggcctgattatagaaagtgctgggccaggtactttaattaattcttttctattaaggcttcaggacaaccctataaggcatggatcatcattccattttattcagatagaactcaagaaaattcaggggctcaaggaagttctcccagttggttagcagtggggccaggcttcagatctatgtcccagggctttcccacccctgaaccacctccagattctgaggctatgcaagaggaaaggcattcatgctgggcggacattggaccagaaacacaagcacacccctccctgatgatgtgggtgcaatctgcattcctaggctcactggctggtctccaccataattactatcttctgtgtgccacctggatggagcaggaaggggaactagaaaggccaccactacagacagcacttttaacacggagcgtgttaacctcttgtcttaatagtattcaaatgaggcccccaacccagtgcactcagggccaacacctggctgcacaatttggatggagcgcctcagtcccgaggagcatgaagatctcattatgtaattaggtctttggaaaatgagctattattctttggctctgcaatcacgggcttgatgcagcttagggatccaaggggatgctgggggtgtgtgtctgttgctcactgctgctgctgcatgaagactgttacagagcaagacatctccagaacgtcccaacctctgggaggaaggaagcgggacttctttcctcatcttccaacagggaacagcttagggattagggaccgtctagatcggtggttctcaaacttctttgagcatcagaatcccctggaggtagagcccagcaacctatgctttaacagttcctccagggagtttacttcagaagattgtaattatggtagagaccagccagtgatctggggaccgcacgttgagaacggggccctctggagtaaactgaggcaccacctaatccccagcttcctcaggaagtccctccaagtcctcaccatcagatctgaactcctcattgttcacatatgcacagggggtacagttgagcttcaaagtttagcgagggagagaagaaggacaggtgttattcctatttttcatatcaggaagctgaagcccaggttccaatgacttagaattggtagaactggtaatagaatctaagtcttctgttagccattgcaacaactggccagacttaaatttgctccagtagatcttaggcagttagttatttccttgagctcagggcagttgggaccactatctaggcacccaaatctatatgcttatcttctccctgggcacccagctagaccacctttcctgccttctttctagtcgggtaaggacgtgttaccaatctctctcctttggaatgcagtgggagtgatgagttcttccaggcctggtccatataaatctcccacatgtattactcctgatgctcgatggaatgtcaaattccagggtgactttggaagttgtgagaacctggagccctgagtatgtatgtggaggagagtcatctgtgagtggaacaactatctagaactttatataataaacttccattatgctaagcctcctaaattccggggtctatttgctatgatggcctaacctgctctaattaatatggttagtttcttaaagtatgatctcaggatgacttgcatcagagtcacttgctttcttaaaagtgagatgcccaggcttcatcccatccctactgaaatggagtccttggctgcagaatctggcaaagctgtattttaacaagtatcccaggtagttgttatgcacactgaagtttgacaatcatatattctggatctgggggttggcacactatagcccacagccaaatgtggctcgccacctgtttttgtacagtctgtgagctaagaatggattttggttcaacaaaaaaatcaaaaggataattgtattttctaacgtgtgaagagtgttattggactacagccatgttcatttgtttgtatatatttttggctgccttttcactccaacggcagaagaatagttgagtcagagacgatatggtctgcggagtctaaaatatttactatctgccccttcacagaaaaactttgctgaccaatgttctagatcctaaaattttactttgtaaaatgcctcctgatggatagtaatgtgtagcaatgacatcatgacctatggatttagagtcccttgtgacatggacatgagagaacaaatattatcattcattcattcacgtattcatttttgtagtggacatttattggatgctctcaaagtgctgggcattgagttgcaaaagggaacatgatgagtgcacaatacataagcttggcaattatgctttttccatgacaatgaaactcattattaaataagagactaaacaatcactaatctctaattactgtataagaatgtcacatgttatttcacagggacttttgtagaaggtgttaacagaaaggttcatgctaggagacaactgctcctattgaagatccttcattttatagtaatggaaaatagtaaaggctgaactcaaagcaattgcagagagttagggacctctttgtattttcttccttttaacacggaatgatgtgaaccagtagaagaggtaaaaatttcccaaaagacaacacctcccttaaagctaggtatagctagtcatctacaaatttctagccaaaagaaacaagataaatcatgtggagaacttttagaaaggttccttaaatagcgtggacttaagaaggtggggagcctctttgccccccctttctcttccagcaacaatggaagagaaagaaggttcggaactccctgagatgacagttgggagagagatgatctagatatacttgaacatcatggccttggccacctagcaagctctaggcaggtggaacaggtgagccagccagagcaagttgaaaagatgctaatgggaaggccaaagagacatagctaactcccacatgatccaaacacaaattaatctctgagaatttggttctaaggttgaaatgtaggtaaggtgcaagaggtttctaggtagcactgattctcagtattgggtatggtctagcttttaggtcaaggaggtatatccaagtcaatgaaatgaattcctgaagaaggattcgatcttagaagaaagagtcaattgaacatgaatccatggtatgaggccaccactacctacttggtcaggggttcatggccaagctccagttctggtagaagcagctaaaagtcaatagcagaaccagagcaaaaaatcagacaagcagtgaggccaagtagcaatgctcagggctcaagaggtacctagaacttaattatcatccatgcaccaaaaacttctcccctaaagctaaatatagctagccatctaaaagctctagccaaaagaaataagagaaatcatttggggaacttgtagcaaagttccttaaagggcactaacttaagaaagtagggcacctttttgccttcccttcctgttgcctcccagaatacagatgtgatgggtgatgctccagcaggcatctggggctatgaagtgactttgagaaaggaagtacatgctgggatggtgggactgaattccatgggagcctgcatctctgttaagcctgaagcagccatgaagcagtctttggtttgcttgtctccagacttcttttatattctataaaaataactttttatcttatttaagccagttatttggggttttctgttacataaagctgaacttactcctacccaatacaccccctatccaggagcatttcctagtatggagtacatgtgtcactgatagtagacaagccatctttagatagcattaactcagatgagcatggatctatgattatgtatttattttaatatatactagagaaaatatagccagcacttcaaacttgtgatttcatggataaggctcatgctggtatttacatttaaaaagaaagtcaatttaaaataaatggttgaataaataatagaacaaccagcttgcaagaacggcaactgtagtgaaggtagaatttgaatgactgaatgtttgcaagcagtgccatagggaatgatggtgaaactggacctgccttgttgggagacccagtgcttaccttgcctacagcaggggctcagtaaatgtctgtggaatgaatgacaacgtacacaactttctccctgaatgggctccagcttctctctgaatacccttgcctctgcctgtagcccacctcctccctgcctctggataaaagatcctaagctctttctttgtgtatttttctaatcttctaatatgcaattgttgttttcaaagcacaagtcagttacctgctcttggggcttttacttttcaggttttcttaaacggaacttttagccttggccatttcacaattctttgtttatttctttctcacactggctcattggttgggccccatttcatgtggttgaaataaaaacagaaactgcctcccatatagaagatctatggctacttgtttctctagagtattaatatatttttcacttgtggccacatggagccctaactagaacctgtctcctagggatgggaggaaagaggaattcccttgcttttaaccagctcagctacagcagggacctcccactgcagaacctcccttaatctcagcattgttccaaaacccatcagaagaacagtgagcctgccctgggtttgcagaccactttacagagcttggagtgctttcagatctctaatctgagtttctgcctgtacaaggagacctggaacccttgttggtcttcagtcctttgggctcactcgctattgcaaaaatctggaaaaggctgggaggagcatgtagataaggaggacccaaccttgaatggaggataaatgaaatgtctaaggaggaataatgatgtgctgtgttcccattaagatgaaccatgacattatgggaactgggctcagggaacaaaggggaagcccacttgggaattcatgtgggatggtggagagaaagagaaatggtataaaggatgcccaaatgtcttggagagcattgagaaccaactgaggcagagtgacgagaagtggcttctgcaatgtggacctgatggtgagaggtggagctgtggctaggagagtaataaccaaatagccttatgcacctgcaacctctggttagctccattggtacacagaagtaggaaatattaacaagaaccaacttctggaagtctggtttttaaatgttggtatctgtcagtatgatctgtgttggtggtaactgccctacctgttgtaataatacccagcatcctatctaagctttatgataacagtcaagaaagcagggccaggatgatatccccattttatagtaaaaagactgaggtttagagagtcttaccgaaggtcatactgatgatgggtagcagaatttagtctagatgccaggactccagtttcctttccatcaccccagtgactctgcactttgtgattcacaaagtaagacatatggaacagttcttgcccttgctaatgtaacaatatccttttccttgtaactactgccacttcagccttcctctgtgtatctggcatctccagtgggtctatatctacttgattcttctctcctccttgaccttcgcttggttttatggtctctccaatgacttctttatttctcttttttctcttccagacgaatttaattaagagaaaaatttagaggttggcactagtttctgctgtgtgttatacctcgggtagaactagttgggagtggtggacactcaacttttcttccatcctttcctcctacatagattggctgggtgccatgctctgtgtgggaagcaagaggaaacaggaacaactaggggaaaccttacttgggctctagacctcttggagaatctgatgaacaatttagcctctctcccttaaaatgtacttgtccccatttgaccaaggtttttgcttgaaattatagggttcttgaatgccttgaagcctacctgtaaatgccagagacgtgtggctaagaaggggtggagggtggtgcagctcttgatgggcaaatagctggtgacactgtaatacagtcagtgcagagaggaagacaagtaaagagctagaggagtgcctgggtactgccagtctgaaaccaggaaggtcaggtctgcagagtaagctctggatgatgttggggaacacagtgtggggcagaggccaggagtttaaactggatcaaagcagagatcttgcaggtaagagggcatttaactggggagtgtcagtgcctccctcttgaaacggtggtgacaacatctttctcacaggattcttggaactgtgaaaagataatggataggagagcccttactcctgcattgtctccactgacccttgtgcctctccagggcagggaccttgtgttttcacaaaatccctaagatctagaacagtgcctgacatgaaagagacgctcttcaaatgtatatgtattacaatcaccagagcaggcattgtttgagcatctactgaataagcaaatgaatggagggaggcagacatggagaaaatggtttgattctatcccaagggggtgacatatcagctttggaattgcccatcttacacaaataaatgttgtcctaaaactatatgtgtgtaaattgaagtctgataagaaaaatcctcttaatgactttgataataatttcagagaatctttgcttctatttcctcttgatttaaaattggcagttgcctaatatatgggccccaacagcacttttttctataaaggaagaaatgcccagaaagtcaactcttaagtgtaccaataatgaggggggaagaaaagaggtcactagtaaacttttacatttcaaaagactgccattttccaagcagaaactcttcaaatgtctcaattgactcacccacagaaccaggggcagggggaagagcagaagacagcctgcacccagcctctcagaattaaattattagctccattttacactttagaaaagcatggcttagaaaggttaagtgacctgcaaaagcaagttcaaggtggaataagaggcagtgacttttccgttggttgctgcaaatgaatgttagagaaaaactgagattttataaaactgaggtgactcataatgtagaaaatcctcctctctgctcccacctctttccaagctttgttcatgaggcagtgtttgcacaggaaggacaacaacagctggacacacctgggtcagaaacctagccctgcgttccgagctgcatggcctctgccactgaacaccagtgcgcatgtccatttaccacccaccctgctctgtctggtccccattcacaggtcagttgggcccagctctgggggatgagtgttgggaaatgaggagaatccagagaaaagttgccacggcaacaggggagcagtggtggctactctctaaggtgatctatggctccacacacgtcagaaggtttgcttgtttgctttccatctggaccctccaagcttccgggcacattgggggaatattaatggcactccctccctcctctcaccctttcctggggcagccacctgggctttgggtaccacctgcagccagcctcccggagacagtctggaaagctgctttggttgctagtcttctttcctcactgcataatggacacatcatgtctcagagctggaagtgatcacagagatctttctggcccaatgctcttgtttgatgtgtggggaaactgaggctcagggaggtacagtgacgtgttcaaagacaccctgtgaataaggagaagggtcacaagtggaactcatagtctagggctctttctgcagcaccttcttgcttctctggggctaggaagaaaggctacttagaggcaagttaccataaccaactgactttggccaagacacatcccttccctgggccacagtttctcattctgatcaataagaattggaatttgtggttgatgattctctgcactgttaatagaaatgacataacctttttgaagactcaaaaaatgggtcaaaatgggacttacaaaccaacttctgactccactaatttttcttggtgtctgacatggtttagctctgcatccccaaccaaatctcatgttgaattataatccccagtgttagggaagggacctggtgagaggtgattggatcctgggggtggattcccccttgctgttctcgtgatagtgagtgagttctcatgagatctggttgtttaaaagtgtgcagcacttcccccttctctctctccttctggccttgtgaagatgtgcttgcttcctctctgccttccaccatgatcgtgagtttcctgaggcctccccagccatgcttccagtacagcctgtggaaccatgagctgattaaacctcttttctttataaattacccagtctcaggtagttctttatagcaacgtgagaatggactaatataatgtctttacagaagtcacgtcagtttccaggagctaaccaatagcttagccatgaattccccttcgttactgtgtctgagtactgcacagccctcctaataagtttccctgcttccagtccaactccgcagtcaagtatctaggttgatcatcctgaaacccacatctggccaggccatcctccttttcttgcttaaaacccagtcatgggccttcagggtcaatatcaagctctttagcacggatatgaggcctttcctgaacacagcattatgccagagtcctttatcattacccctctgcttcggtgtgaccacaatgtttcctaaacatgcttggatgtctccaacttcatacatacagaaccctctgcctttgtccacctcaccccctttttgctccacttgtcctaactccaattcgctcttcaagatccagcttggctatttccctgacactctgaagtgttcctctgtgctccctcggcacctggtacttatccctgttaaagctcttctcatgctgcataagtattgtatttgttatctgcctctttcatgagaatgcaagctcctagggtagtaactgggtcttgttttttttttgattccctagtgtttcctgtagagtctgacatgtaggaggtacttaggttatacttgctgaatggctggataaatctcactttagaagattcgttcattatcaagttatagggagttgtctaaaattaattccaagtttaagtcgtgagtacctgttacacactgtgtttgtcagcctatcaattccttttaccacaagaggtcatccataaaatgttccttggcttgagtgtcagaagacccttaaacaagtctttattcctggggatgtcacttcttcttcctggccattagctatataacaacaggttgggcctgatgacttaaaaaaaaaaccttactttatcccctttttatttcatttcccataattccaagatatccaatcagcagtcaacagatagcaagtgtagtagctgaggtcagaataggaagaaaaaagtctatttatttaaagtttaattatagctgaatttggggaacatggacattggcaaggtaggacttgcctagaggggccccaaataactgtccagttgagcaggaaggagtagacagataccacagatacagttcaggttggtaagctaaggcaggttggaatagccagatggtgcctggggtcaggatcagtgcctggggtcagcatcagtgactaggttggcaaggctgctctaagaacagaggctgtttgcttctggctgatgaccctcccatgatgctatgagtggggacaaaaggccagcagtggagccctgctcttgactggcacaaggtcaaattcatcatcattgattcttagagatgatcttagtaactgtcaattcactgactttatctgaataaaatctgaagttttaagctagttttatggttgtataattctggagaaagaccaaactcttggggacagcattcaaagttcttcactgtctttctctccggtctcatctccttcctcttatactctcttcctcccactctctctagatgctctcagctctttgaaggcactctactttcccatgccttgccttggtacctgcacatgcactgccttcctcttctctcgtcatattctcctggacagctcctactcatgactcaaaactcagctcagctgtcaccttctccagggagccttctttgacatcttctccctcaaatctagatcaaggatcctttcttatcctcccatggcttgcagcgttctctcttataaccctcactaaactatttgtttatttaattgctttcccactaagaacatgagttccttgaggacagagattcttattgctgtatctacagggcatagcagagtgaaatagtcaatgattttttgagtgaataactgtattataatttttttaaaaaaggaactataaccatctaagtccatcttataaccatctaagttatagttttctatcagtattggacaaaactgaaattgggctttaagtctttgagaactttgtacaccctgttaataaatactaagaagaaatgtttgcaatgagcatacactttgttaggtggcaaatagtttcactttcagtgtttcgtggactaagcattccctttgcttataaaactttgcaaaaattatgcatgttctgcgtgctaggtgctagaattcagccagacaaagggtgtgtaccaggccctgctgaattagcatctttgtatggtaatgaagcgtgaagagtggccttttgctgtttctttgtgactctgttccttcctgctggtgcttccagtggcatttccttcagggaattctattaggaagtagattcttcaggagatggattgagctgggagggagccagaggctcagaggtgagtgtatagggcaggcctagaagaggcacagagagtgaagttgtgtaacatacaaagtactaaactccacgaactcccttaaggaactctggtgtagggaagacaattgctcaagtgctggtggcactaaccctctggcgtttcacctctcccttgaagtactcctaatttgatctttccactgcttctctctgtaaaagaatctcactaaagaaagatacaaaatgctccacagctaagacaagctccccagagaaagttgccaagggaggggcaactgcacctttgctgcccagagtctgcctccccatgggggcttactctgatacctgcctcccttcatgcctgctgtcaggggtactcactctttttttgtttctaattctgttgtgagcaaaatcagagccttcctttggttcttctcagcatcattaacaggcttgcttttcagaaagatctttagtaaaaactcagggcaattgataaagataagactgccaccattgttaacaaggaccacaaaacaaaacaataacctagctgagatagaagagtgcagagctcttgtccattataacgaggcccctggaacttgctttatttttctctaaaggaatatgccaagcaccttctttgttcgagcttaggtattctcttctgaagtctactttctttcaagaagaggcccagtatttatacctttatacttccacacaaactgaccactgtagcatgagacagtaccacagagagaagttggacaagatggtagactatattttccaaaatggactcatggatatgtatcccattccacaagttcttacagtgtggcatgacacctctccattaagaagttaaatctatgctctctcttcttgaacccagtggaccattgtaacagctttgatcaatgggatacagtggaagggtactgtatgacttctgagtctaggtcataaaaagtgaaatggtttccacctggtgtcagcatgcaccttgggagctgacatgtaagaagtctggctaccctaaagctgccatgttggagaggtgggatagagaggccacatggagacagaaagagatgtccatggagtttgttgttggagttttcccagccttaaccaccaatgggtgaaacttcagataattctagccccaagccctggaggtttctagctgagggcccagacttcagggatcagagaacagacttccctgtggagtcttatttgaattcctgacccaaagagggcatgagtttaatagatggttgtcttacaccactggattttggggaaatttcttatgcagcattagataatcaaaacaaacaaggagagcattttcccaacgttagcactgagttgcgtgacttaacctccaccactttctactttccatgttaccactgacccctggcacttttcccctcttgatttctcccccatttaaggcttcatcttgcccctttatttggactttgcttctttggccaccatctttcctctctcctcaccaatgatggaggttctgctgcttctgctggctttctttctctgccctcctttcacccgtcttagctcaggatcctctcccatgccacaaactttccacagggaggccctggagagggacatgggtaccaggtgctggatggctggggaaggcaatgtccttgttgggaacctcacttctcaggtggcatttactcagatataaaccctccagacacaagtctgccaccttcctgttcttgaagatggagaaagcaagatggagtgaacatgataaaggccctctgcttccctatgaagattatccttggtggtgaataaaacaatgggagcaaatgcaaaaagatcccagaaaactaaaatatcaaagggcagtgagtgttccaaccaaagatctcaaattgctgataggatttccaggagggtcaccaagaacctgccatagaccccacttccctaagaatagcagactctgacacatggagagccagtaagagttaaaagcagagtatttctctagtacctgaatccactttgagaatgagctggctgccttgagaaggtgatttgtgagcctgagtcacctaattggaacaagcccagaggtagcaattagacaatgtcaagtccttgctcttctcttacttgttgtgtgactgctgacaagtcactttacttttttgaggcttcctttccctttttgtaaatgggaataattccagcctgccttgcctccttccaggactgccatgaggataacatagcatgatgcacaggaagacactttaattgaaagcatagcacatgccatgctgggtactgggcactctactgatgtcatgtcacttattctttgtaacaatcctgcaaggtaggaatgattaccccatgttacagaggaggaaacaaaggggcagtgggactatataactccccaagagcacatggctagtaagaggcagagctggcattccaactcagatttttccggtgctgaagccaatattctttccattagagcatgattactattagtgctgttgttgttattgagttatgcctcttctgtgatccatttcgagagcatattcttagtataaggaacacaatgaggtatttgggtctcatggaagggtacctgcttgcccccaaattctctcacttttaaccccataagccatactccaactaaattaatcagatttctgcagcattgtctcccaaagaggtctggattcctaagactgaggtcctcggggcatgcagggccagagatgatgcaaccaatgatgtggctgagaagatgactatttccagtgcctgctgatggcataagggagaccaggcagcattccccaggacagccaccttagggacaggctgatgggaggctcagtttctgcaacctacagggagcaaaaatctgagcccgcaatgcaggcaaatctagcctggacaagctacctgaattggaatgagcaggagaatttcagcatgttctcctcacaatgctccctaaatgacttttctgatcaaagaacaccacccccaaccccaacaaatgggcaacctcgcagtactgggaaaatgagcagctgggcatgcagaccatgctctgctttccaacaaattagcctagaacatgtgtattctgcctatggagaatcaacataaggggaaatgtaaatgcaagtgcaaggccttcattaaagacagctctcctgcaagcaaaggctggaggggaggggtctggttctttagcagtcaaaaccaaagcaaggtctgttactcaaagaccctggccgtctctggaagcagggtggagggaggggtgaggaattccacacctcccagctggaggaaagctcagaatgtaccatgcaaattctttgattagcattgggaaatcatctccagaaactagttgattcccactgggattctctctagcacagcagggtacagtaggaaagcaggatttggaaaagactcccagtcatgccatttatgagcctgccacttgggcaagttcctggctctgagcatgtacacgtgttaccggaaaggggtcccgatccagaccccaagttcttggatctcacacaagaaagaattccaggcaagtccgcagtgcaaagcgaaagcaagtttattaagaaaataaagtggtgaaagaatagctactccatagacagcgtagggtgttcaggaaagtaagaggaggaacacgcccactctaggtataatgcttctttatatacaggataacaaaaaagtcatggggagatgtgctttgctatatcacaagggtttgtgataaaagattagttttctttattactatattttgcaagaattgatattattgtctttaaagcaaaattaagaatgcttctgttctcaagatagtgggatatcaggatattcctgagtctgggtctgtttagtaaatgttatgaatctgtccccttaactgtaaacatctagaggctaggaatagctaacttgctgggaatgtagcccagcaagtcccagcctcatttttcctagccctcactcaagatggagtcgctctggttcaaatgcctctgacacatgtatgtgcttgtgtgagccaaaagaaagcattgctgaaagcaagaggctcacagggagaggtcacacaacacatggcccaggaagccactgaaaaactacaacaaaaaataattgagctctttgaggcctgatgggaatcttactaaaaccttcctttcctccttgaggcttgattttcacatcttgactctgccactgactcatctgtgtgacgtagtcttattcactttcccttcacctgtgggatggacatactggtgctcatcagggccagcagaggaattcaaacgatgtgacatgtctgaaaacactcgcaaactataaatatactttgggatttttttttttaacagggagagggtgaaaataaaagagaaaagcaaatttcaaagcagtgtgtgcttcctctttgtgtgaatgaggtctactgggactctaatccttagagattgttctttagggctctgagaagattggctccagagcctttaaaatgatttggaaattgaaaagagaaagttaaagccatgtatgaatttgtttgtgcagggcataggagcagacggtgaggacaggggtatgtagaagatcaccacgtcatcccaggtggaggtgagctggggaggcagtgagggtggtcacaatactgagtgtgaaggctctagccccagaggaattcagataggaataacacttaagaagaactcccccagaccctctctgcctctcctgaagctggagctgcactagatgaaatggcataggggctgagccagctcaaatacttcctgctgcgagtgtccatgtttttaagaactgtagcagggctgggctctcagggggatcagggtgtgggaagtggcaatcagaaggcatacagatgttaaggaggagtgataggtagctggtgttagcacagaagtacagtggggcttctggctctgctggcagtgaaaaagcaagatcagaaggtgctacattgtccttgagtgatctcctttgtgggtggcctgtgtttcctcacctaggacataggatcaaagctctgcctaccccctggggcccgggggaatgagacaaagcagcaggtaagaaagggtttaggggcatgaagccaactgaatgggtgaggggctggtggccaccatctgcaggtgaccttctggaactaccgcccttcccagcatcttctccctacttggctgctgggacctcatttggacctcaccttggtctccacatggaccctctgggctctgtaatgttactctcccacctcccacactctggcctctcatgctctcttcctgagtccccagccacattcccaccccattggaaccgctggccattgggatctgggcagcccatagccccctgggaggtaacagctcccagtggtgaaacagctgtgatggggcttccacgcattgtctgcacctcagggtgggaggtccgtcttggctgagggtagatgcccctcatcgtggtctcagcagtggaaggacaggcttggccaggcccaggaggcaggaggggatctgttgcctgttacaggagagttctcttttctctctctgcacttttctctgacctcacatctaatttgggttagggcgtgggaacacctccatcagtgatgcccctggggttctgatgctttgggcaagggtggggacttaggataagcagaaagggaatggctttgaagctttcaaggcagagctaaggaatactgtgagtaaatctgttccatgccaagaagagaacccaggaggaaggataatatgtccctggatcctatggcacttatttgaaatgggttccatagagcatgtaatcgacctggtcagaaatgcagaggaataatatttcagatgctaggtggggacagggtgttctgaaaccacctttgcaaaattatgacagtaagagaaatctgacatagttgattccatcttgcttctgacctctaagctgtccttggtcattcctgggcataggcccattcctgggcaaaggccaagctaactttcaaaggaatttagtttatagtttaacttatagttaaacaaggatgataatagctgcttcctaacagtattcccctccctgtttgagggctgtaactgcctttgtgaaaactaatgagggaccacaagattaggattctgagagaggcctgaactctgctagacgtagatgcagtttctataatcccttattgctcaggagtcatgtggctagaggtcacaagatttgtgacttccccaattgctcctgtagataacatcactattataaaacctaagattggtcttttttttctcttttctcagatggagtcttgctctgttgcccaggctggagtacagtggcgtgatcttggctcactgcaatctccgcctcctgggttcaagcgatattccctgcttcagcttcccgagtagctgggattacagaggcccaccaccatgctggctaatttttgtatttttagtagagatggggttttgccatgttggccagactgctctagacctcctgacctcaggtgatctgcccatcttggcctccaaaagtgctgggattacaggcatgaaccactgcgccctgctgttctttattttttatttatttatttacttattttgagatggagtttcactcttgcggcccaggctgcagcacagtagcatgatcttggctcgctgcaaccaccacctcctgggctcaagtgattcacctgcctcagtttcttgagtagttgggattacaggtgcgcaccacccaaccaagctaatttttgtatttttagtagagacagggtttcaccatgttagccaggctggtcttgaactcctgacctcaggtgatcccgcctgcctccacctctcaaagtgctgggattacaggtgtgagccaccgcacccgacccaattggccttttgatttttagacttgcattttggcaactgtctgacctcatctagaccggtgactcatgactcaatgggtcccgtggcacccccaagaggtggactcagtgcacgaggatggttttccacacccctatgatttcatccacaaccaaccagcagcacctatttcccagcccctctgcccaccaaattatccgtaaaaaccctaagctctgagcttttggggagactaatttgagtaataactccctgtcctacatggttggcgttatgtcaattaaactctttctttactgcaatgctgtggtctcagtgaattgattttgtctgtgcagtggcaggaagaacccaacaggtaattacagttctctcagcatagtagtagacagagaaagtgtgagcgtgaggttatgcagcccagaccaggagtccagggaacagggttcttgcctcaatgtttccacttggcacccacaggaccctgagcctatttttcactgatgagggaggagtgtctgaatggttaagtaccttctatatgcttgacaaagcactaagcacctttgtagagagatgatctcgtttactttgaaccacagccatgagagttatggagaataacctctattttaccgacaaggaaacagaagcccagggaggttgggaccgtcagagattctgcttcactaggtctctactgagcccaagaatctattttttaaagaaatctgagtttttaaaatgctccttaggtaatcctgagccagaattattaattaattatttattcattacatagtaaatacatagtatgtcagaggatgataagtgttacatagaaaattaggcaggttaggcaggcagagagccctgtggtgggggtgtttgctctcttatcaaggtttgtcagataaggccccactgatgaggtgacatttgagcagagacctgaaagaaacaaggaagtgagccatgtggctctctgaaggaagaatctcccggcagaggaaacagcacatgacgggctctcaggcaggccgtgcctagcatgttcaagaagagtagagaggcagtgtggtgggggcagagagcgagggggagagtggcaggagaagaggtcagggaggtgcagggacaggctatgaagattcttgcaggcctttgtaaagactttaattttgattatgaagtttacggcacactattaaaaggcagtgagcagatacgtgccagggtatggcttgcgttttaaaaggatagttctggctgctgtgtggactgactacaggggctgacagtggactgactaccgggactgcaagggaagaagcagacagaccagtttggaggctccaaagtcatccaagggaaggtcacagtggcctgaaccctggtggatgcaggggaggtggtgagaagtagtcaaagtctggaaatatttctgagggtagagctatttgctaatggaggtagcaatgcaaggtatcgaaaaggacaggagccaaagatgaattccaagtgttgtcctgagtaactgaaagtgctcaggaaacctgttgcctgaaagtaagtgagtagcagctaactaaggtggggaagaaggaaggacatgttggttttgggggtggagataagaactcaagttatcgacacaatgagtttaatatgtctgttagacatctgaatggagacgttgaataggcagttaagtttatgagtgtggagcttgggcgatgtgtggactaaatatataaactagggaattgttagtatatgtttggtatttaaaaccaatagactggaagacataccctaaggattaaaaaaagatgtctgtgccttgggacactccagtatttagaggctggagagataaggagaatcaatatgattgagaaggagtggccagtgagtaaaaagacagtcaaaaaagaatacaaatacaataaagagtcaggaaagaaaaatacagctgggtgagaaatgagctaatggggtgctcctttgaatcacattttttccccatcaaattgtgtaagtcatccccaaattgtccatttctttttttttattatactttaagttttagggtacatgtgcacaacatgcaggtttgttacatatgtatacatgtgccatgtaaattgtccatttcaagctgcttttcaaagtgcatggaataatcaatcttatcttaaacttattgagaactaattctgtgctgggcattctttaggtgttttatgcatatcaacacattcaatccatcgcaattctgagaagcaggcactgttactacccctgaattaaaagcaaggaaattggcaaaaagagaagctaaactactgcgaaagttcacacagctccagaatccatgatcttgaccatttcactacccttcctctataagcagaattctttaaccaacttatctgagcaattatccttctcctcctgctcctctgccattgctgccacttcttcattttcttcctcattacattatcatcatcatcatcatctcatgtagcggttgttgggcactaaccatggccttgggcactcttctacatattctatacaaattatttttcaattctcacaatcaccccggagagagatttgaggatccccattttgtaggtgaagaaattaaggatcaaagaggctaagtaattcattcattccctataatctttaagaagaaaagctgggtttcaaattcagatctgctaggatagaaagttttttttggagggggggagcggagatggagtcatgctctgtaacccaggctggagtgcagtggcttgatgtctgctcactgcaacctcctcctcctgggttcaagtgattctcctgccttagactcctgagtagctgggactacagacacttgctaccacatccagctaatttttgtatttttagtagagatggggtttcaccatgtttgccagactagtctcaaactcctgacctcaagggatccacctgcctcagcctcccaaagtgctgcaattacaggcgtgagccactgtgcccagctagaaagttctttatttagataaatacagctggagaatacttcttacaagtgaaagacttttaaaatggctgtaatggctccttgagaatttctctcttctaaacctagctctcactggcttctcattgccaatcttttatgtccaatttcacaatggctttgacccaatcgcattcatcttatactgtcccttctctctgccttaccctccaggcaaagaggagtacttgtgatttccccaatataattcttatcttctgcaacttgtccattttcttttctcctcctggtccctagtccttttccatgcattctgcaatctggatgacatcacaccattcttctaggctcagctcaaacaattttttctctgtgaagactttttatgtcttctcaacccctagctcctctgaccttcatctcctgtttctgattgtggagcacatatgactcagccagttcagatgctggcaccttggtcaagtcattgcccctttttgggcctcaatgcaagaatatgaaagaatccagagatcactgcatgctattttatcaaaatatgagaataggacagagtggggctccataaggccactgagcaataccagttcagcagccaaatgggttgccctgaataacaggtcccttctcaccacgactgctcagcagataccccctggtaggcacaaggtggcactggatagcactctctgctctatgcatggcatagaggctgtgaagccagtagatctgggagtcaagtccacttacagctgcgtgatcttgagcatgtcactttttccagtgcctcagtttccttctcactttctaaattttgaatgatagcttcatcagagattgttgtgatcatatgcatgacacatatacatgttctatacatgctccttcactgccttctctgctagctaaacattgtggccaccagctttgcttgaaaggcagggaagccccctgttcctctgatatttagtgaattcctagacagagaacatctggactctaaaccccagaggcttcctcagctggttcagagggctagcagctgcaggccctcccatgaatgatgggtttgtctgcaggcccagggaagtgggctgtccctgcaggcctcccctccgcctcacccatccttcctgctggctccattctgggtggttcatgctctgccccttgacactctctgattcctcagtgtgggtagaattgcctcaagaagtaaggtggtcaaactgacaaaatatgtagcaaattagattacgcagcaggcttttggtgagaggtgattttaaagatgccagtgattggaaatgaactggcaggaaggcagcaaatctcagaaaaatgttagatggtggggattcttcatatcagtggatgtttctacttaactgtggctgtgccacggcttcatttcttaggccttgatgttgtccacctgaaatggagctgagctttggatctggacaggaacagcaatggagcaaggcagttggaatctgacacagcagaatgaacttgagatttggagggcagaaatccttgtgagtgacctggggcaagtgacttaacctctctgggtcttattttcccaactactttccagggttagtatcatgattaagtgacagccagtacatagggagcatactttgtaactaaaaattatccacaggtattagcatttaagggttattggagcattaaatgagataacatatgggaagcatacagttagtgactggagcagaggaaaggacacatagttggtggctttcacgggtagtgatggtgatggttttaggaggtgacatggtgtagccctgccttcaaatgcaagctctgtcacttacttgctgtgtcagagactgaacaagttacttactcctcctaagccttgtttttctcatctgtaaaagggggctgataatatcttacactctggcagttgcgaagttcagataaactcagcaaggaaagcactcaacgcaatgactggggcacactcataagttatttacccctttgtcagaaatgagaaagctgtttggttctaagcactttatccacaactggtctcccacatatccagattttataggactcctagctcctgggaccttttaagggggtgaggattcccgtggatgccccagtattttctgagggcttctgtttcgctcttcaaacctcacactcacaccttttgcctccctctcgcaccttgtgctgatcctttagggagccctatatgatgcaggcaatagaccagctccattttcttcctaggaatgtggcgaggaccatcaaggtgatctgcatcacctttagatgatcagctatggttcacacattagttactgctcttattcattttaccgttgctaatagagggcattggtggtgaggccaagggactgcctggctctcaaggtgaagatgggtgttaaagagaacaaaccaagctcactctattccatgtacatctcttttattatcatttaaacttgactttagtatctggcaccgagtaggaattgagtgtcttgcacagaataggtccatagtaggaatttgttaagaattggttacagttgctgggcacggaggctcatgcctctaattccagcactttgggaggctgaggtgggcagatcacttgaagtcaggagttggaggccagcctggccagcatagtgaaaccccatctctagtaaaaatacaaaaattagccgggagtgctggcacgtgcctgtaatcccagctacttggggggctgaggcagtagaatcgcttgaaccagggaggcagaagttgcagttaggtgacatcgcgccactgcactccagcccaagcaacagagggaaaccctgtctcaaaaaaaaaaaaaaaaaaaaaaagaaagaaagaaagaaagaaaaaaagaaaaagaaaagaaaagaaatggttacattgactcttatcatgtacatgatgatgatgatgatcatgatgcgtaaacattgattaagtgcctactgtatgctaggcactctatgtgcatgctatttaaattctatctttgatgtagaaagtgttaccttcatcttatgcaggagaaaaaacaacaaggtcagggaggtcagggagtgacaggcttccatcacacaacagcccacgacagagacccatctgtctccagatgttttacatccagaatctatattcttctcctcagggtctaggccaagctgtcgctggaaagtggtcatcagcttttcagtggttgatccctctgctgccttggagagcatagtcatgggctgtgaggctgcctcctttgtccctcatcaaggatgcaacattccccaaagagcccttgaactgcaggaggcctgagtatgggtctgcatttttaaaaggcggaggttccttctcaagtgcctcataattgctgctattccacagattggcagccctgatgttcctttggcctctgaaaggtccagtctctctgtgtgaaatcaatggagtggcacctgggtggctgaccttcttcaggctacactccttactgtgcaccctctgcacacttgcctagaattgccccagtgagaaaaaagtgggccaaagaggcccttggagggatttgtattttaaagaagagctggaatctcggctcacagttcgagatggcagggtttgggccaggagaaggagaactgtggcttttcccagcaggagcttgtagcacttggccggtggctgtgcttgctttgtccgtagagaacaaagtgaagaactcttattccatctccagcagacattaatgttgttcagagaggatttattggctctgaaaccaaagctagccgtgttatttactggaaatgccatggcaggaactctcctttttaataaaccagaggaaaacctgacttgtttggagcaggctggttcacacccatcctgggctgaggcaccaagagcatggggggaggaactttctttgctcaggcgctgccgcctctgcctctcacagctggaaccagttgctttcatgcccagcaagtccagcccagccgcaggcttccttcacatagcctgctggtctgggcttccggcagcatctgcctgtgtgctttcatccaggaggatagggaaaatgctggccctggagtcagatagttccaactcaactctgctgccagcagtatgtgccccgggggggcactgaaactctctttgtgaggtgtggctagtgatgataacacccacttgggaagttcatttggaggagaaaatgagaaaaagtatagaaagagctgctcatggtatccgacacagggtaggtgctcaaaatatggtagctattcctatgatcataaaggatattaaagcataggtcatggcaaagtcaggcccagcctcaaatcccaactcctccattactagccgaatggcctataccaagttccataaaattctctgaatcttggattcctttgcagaaatataaactgtactttgttctgagggttactgtaaagatgaaccaaagtgagggatacacactggcactgtttttgatgcataagaactcagggaatgcgtagtaatatatatttaattgctgcatggtgggtgttcaatgcccctcagttctttgttgtaggaccccatgttagtcccacgttggatctccctggtgctgaagggttgtactgtgctcatattgttgtgggtcacctgctctgccagacaccgggcgctgtctctgcacttgacttccttccaggactcaagtgggagaaatattctcagcaggtgggcctaattcctgttccaatacctttcagaatccatctgaacttagggcaggaatctgggccatgcagagctcagattcaaaacaggatgcaaacagacacagattaaaaatgagaacctttttttcggttgaaaagaagaatcgatgatgctgaagttttagaccaaatttgttcttttccagagacactacactatggatacggtgggaggcctctctatcagaaggctggtgaaagatatgtctccagaccccaaaatggccttcttcacagcaggaggctgcatcaaaagcagtatctcttatgctacaaacacaagtgatggatccatgaagcttcagccccatactatgtgaagtcacataaggaaaataggaaggtgcccatcatgggtttgccctgcagacctattacatgtcagacactgtgctgcataatccacaaacagctcattcgattccctgtaacatgagtttgactatccttgttttatagaggaggatattgaggatcagagaggctaaggagcttgtgcagatttcacaactagtaagttctctgaagcagggactgcgtcatcttcatctgttcatgcaccagtggtaaacaaaatactcagtacatgttagcagcttgacaagtgttgtagcaaatgaggacaaataaattttctagccttgttttctacttaccccatactcccaaatttcttactgtttcccagacttgccatgtctctttctggtccatgttttcaggtctgccgttccctgtgcctacaagatctttctcctgtcttcacctagaaaactcattccctgcccacagaatgagttcagggaatataaaaaacaaacaaacaaacaaacaaacaccacacacaaaaaaacaaacaaaaaacctcccattccttcttcaagacctacctcagatgtcagcttttctgtgaaaaatttttaaagtcctttcagtagagttagtatctcctatgttgggtcccatagcaatttgagtacccctctcttagagcacttattacgtggatttcaaaaagtgattttataccctttcctttcattagatcatgagtggtttgagggtgaggccatgttgggattgcctttgtgcctgggtgtctatatcttggagggaaaaccatgccttgtcttcttggaaatatcccttaagcagattcacttcttttttaatttgaaagtagcatgttcggctcctacctcctgggagtggaaggtacttcccaggttgttgataccaagaaatggatacgcagaaaattatcatgaagtgactggcaattccaggctttgtggcagaaactcatcccaatatcaatagtaaattgatcttttgactcatactttgcttttctgtgagtttgacacacgtggatcaattcctccatgtctcactgtctggacatctagagacagagtcaggttagcccccaccagggccccaccctgggcctctgctcttggcctgacaaattcaatgtttctttcaatgactcagacaaatacaatgagcttttgctcatcacattttcagatgacaaaacagtggcagggatggtgattatgtcagatgacagaatcaggatccaaaatgatcgcaataagctggaacaaagggtcaaccaatttagcagggattaatactgggtccagaaactaactgcacagggagggattggaagggggtggcgtgacttagcagaagcatcaaaggcttgtttactcaggagtgagttaaacacaaaccagagagtggtgtggctgttaggagtggaagctaagcatgcattattaaaagtagaggaactagaaggaaggaagagattgtctccctggacttggctgttgtctgtcagcacctggaatgggatactcacttctggcccccacctgttaagtagggctttgtcccaaagtggttcatgtccctaggaaagtgatctgatactgagacatctcaaatccaagaaacctagggaatgttaccctgtagaataggcacttaagaaggaacatgattgccctttccaaatacccaagattttgtcacattgaagggtgattttgtaaggctaatggacagatttaatattaattggtaaaagtgtcagccagacatatctctgttctatataagaaagaatgctctaataagtcagtgctgttcactaggagaatgagctgccctgtgatgctaggatcttttttttctgtgaactgattgtcaggagtgttatgggagggattatgatgtcggagggaagtatcaacttccaggtgccatccacatttgacaggctaaaattccaagttatgtctgtttacctgttactttaacactgtgagtttccctagactcccccagtccagtgaggaggagaatggaaaagtgggtattattagagatgcactccatgctgtatctgttctgccaagggcggattattgaccttggaagaaggacgtgtccttcagtcctctctgtgctcagatagaattctttctgtaaggttcctccttttcctttgcaaatagacttagccctctaggccagcccaagccaatctgagtccctagaacatgagcccaagtccccttaactggtactcacactccttgataactatgttgtttacatttcatatccatgggtctcatatgcccaatgccatcataaatacccagaaggcagggccatctcttctgatgtgaagcccatcccccataatgcaaggattaggagtgaatgctctaaagtcagacagacataggtccaaattccaaattccatttctctcctttattagctgcatgggcttgagcaagacattaacctctctggggctacttgtctgtaaaatgggaatgataacaatacctgcctcatactttgttgtaagaattaaataaaatgtacaagtgaagaacttagcaaaatgttaacacaggtcaagtgttcgacatgcattagccactaatactctgctgtgagtataagactgaatagactatctttggctgctgcccactcttcagcctgggtttttcccgggctcttcactctggcctccctccccagcccctgagcccctccctttgggtttcaccaggagctgttcttttcagcaccctgctttctcctgagtgaaccccaccatttaagctgtggccactgttcctgcatcccaccgtctgtcttcagggtacatcactctctctcctcccacataaaaccgttccaattctgactcagatttttcttatttcaggggtaagctgttctctcacatgccttgcattttaacaactttcattactattgctcattttgatctgtttaataacatgttttaaactaatctcttgtaataaaaggatttcattactaatggagacagctgcgtaatgcagcaagttcattagttttacttttctgatgaggcctgccggagtgaaaagttctgcaactctgcagagttttggcaggaagctttgcctggtgaagctgagaagaaagaagtgtccagtgtgaggacagatccataggctgcagagagaaaagacacaaactctgcagtttgtgtctgcaaagactgggtggaatgggcagaggaatccctgtctggaggccaggtgataactgtgaggaggaatggcaaagccctgatggagataagatagtgtactgtgagccaggggctcttatgatggtgatcagccaaggtttacaggacccacctgccggactgctccctcgcagagataatgacacctacctctctaccttggcagttgtctgttactatacacataacgtgatatttacttatctaacagactgaaggcactatgtcttattcacccctgtattcctagtatctatccagactggcacaaggagatgtttgccaaactgaaacaaattcttttccctctctattttctctctatgtgctctctcccaaatatatgcagcttcaacagccaagtctaggctgatgacagaaacttttatctccacccttgacctctagagacccacctgtatccctaggtgtccactttgcttctccatgtgactgtctgtctcatattcaccttctacttcatctatctaaagctggatttctcactttcccctatattccacctctcttaccacccctgaagctttccaagagttattcattccagtgaatggcaccactgtatactcagttgaaaacctgggagttatccttgccatctctctctgccttactgctgtgatccaattagtcactaggctatattgattttacctattaaatagaatttgaaaccatccacttctccctcaatgactttactgccacctctctgagctgcagccatccctcacctggactctaatttatacctaatgccacatcattctccaaccaggagcaagagtgatctgttgggtcacatacgcccctgctctatggtttttaacctaagagcaatcccattaacatccttaatgtggtccatgggtccctggaaagagtggccccttctgatctctcggcctcatttagtgtcatttactgcatgactcgcagacttcctgcgtgtcttttattttagttcctccaacacatcaagttgcttccctcagaaccttggcctttgcatttccatgaagacctctgagtggctcgtgtgtgactggcactatgctaagcgtttacataaattctttggggtgtgtgtgtgtgtgtctgtgtgtgtgtgtgttttgacagagttttgctgggattttagctgctttagagtttagctgggtttacaggcccctgccaccaagcccggctaatttttgtgtttttagtagagatggggtttcaccatgttggccaggctggtctcgaactcctgacctcaagtgatccatctgcctcagcctcccaaagtgctggaattacaggtgtgagccactgcacctggtcatttacatgcattctttcatttacaaatcacaacaaagctagacaacaagtactcttctatctccattttatagatgaagaaattgaggctcagaaagattaaggaactcatcaaaggattcagacccagctgtgacccagtccttgcggaacaagccaagtgctaacaggagtgtttgttggctcttttctcaatcagatgtccaagtcagcagaggggacttccttctcaaccagggagttagtcctgtaccaacagagaaatggttaggacctttatcatttttctctttctgcaacctctttctcattcttctggcaagacacagaccctctctcacctagccagatgtagtaggctgagcaattctgcgcgcctgcgccactcccactttccgctgccccgaaacaaatcagatcagagtctctggaacctgtaaatgtcacctaatatggcaaagacgctgcagctgtgattaacttaaggctcttaagatggggccattaccctggcccggaaagcaatcttctaagagagaggtacatacaacaatgtaactatagttaacaatactttattgtatacttgaaatttgctaagaggggagatcttaaattttttcacctaggaagaaaaggggaggcagaggaaggtttgagcacagacagaagaaaaggcgatgtgaatttgataccagcctggccaacatgatgatttcccatctctactaaaaatacaaaaattagctgggagtagtggtgcgcacctgtaatcccagctactcaggagggagaggcaggagaattgcttgaacccgggaggcagaggttgcagtgagctgagattgagccactgcactccagcctggacaatagagagagactccatctcaaaaaaacaaagcaaagcaaaacaaaacaaaacaacaacaacaaaacaaacaaattaaaaaaacaaggcaatgtgatcactgaggcagattgaagtgatgtggccactggccacaagccaagaaatgccagcagccagcagaagctgaaagaggcgtggaatcgactcttccccagagcctctggagggggtacagccctgctgatgtcttaacttcagcctagtaatacgtattttggacttttggcttccagaactctgacagaataaatatctgttgttttaagcccctcactacatgtgagaatgggcccaggactgctggccacacagttttcacctttgtagaaaaggtgatctgatcaaagtacacccataccacagagaatgaaggtgggtggaagttccagccatcccagaggctggctgcttaccctctaccccacttctcatgtgtgcatattcatggatggtcttttcccctttcttaaggatacagacttttatcagcagtgatcactcattcaccaggatggctctgactgcatttctaggaataatttggtccagacctgcctctcatggtaattgactagttcaccacatggcatagactagtgctgtgagcccaggtgtctcttagtacaacctaggctctgctgtggtaatcaatgcctgccccacaatttcagtgacttaatatagcaaatgttcacttcttgctcacacaaagtccaaggcagtgtggctgcactccctgtggtaacccagcaatccaggctgcttccaacttgcaagacctccatctcaattcatggcctctgcggccacatcagcagccctgagctcaggagctcatgaagaagttactcccactcttgtttgtttgtttgtttttgagacagagtctcactctgtcacccaggctggagtgcagtggcacaatcttggctcactgcaacctctgcctcccaggttcaagcaatactcatgcctcagccacccaaatagctgggattacaggcacaagccaccatgcctggctaatcttcgtattttttgtagagacagggtcttgctgtgttgccctggctggtctcgaaatcctgagctcaaagcaatccacccgactcagcctctcaaagtgctgggattacaggcacgagccaccgtgcctggctctctcccactcttaactgcacgcaaacagatggcacaatgtatcccttctgtttacagctcattgactgcaaccagtcacctgagtctgaacttaactgcaaaggaggctgaggaatattgatatgaacactaaaagaagaggaaaatggatatagtaagacttacaaatgaatactacagggaggtcaccccaattctgttagtggattctaggctcaaagggaaatctcatcaaatatgaaatattgctgggcagggtttcagctaatatgtcagcagagcaaagacaacatgaaaaaactatgaggctagctgtgatgagtgaggctgggtaggaaattaatgatgactcattcaggactaagacatctagcccattagttaaatctgtctgcagaggaaagatcaaggaagagatttggaaagcacttatcacaatagcccctgacaagaatattctgtctgtcttcatgcatgtgaatctgtaggcaagcatgcattcctgaaaatcctgagatacttgggaaactatttatgaacaggaatgatgataagatgagtttggggaaatgaggcttgagcacaaacaacattttccaagggttgtgggtaaataacaatgatgagtgaaacacaatacacttcatcaagcaagtacgaatgaccaactctgtgctgggctccatgtggagcctcaagaatcacggcctgctgaggcccagcctgagactggcacatgctgctccttctgcttgaaatgtctctttctggctgggcgtggtggttcacgtctgtaattccagtactttgggaggctgaggcaggtggatcacttgaggtcaggagtttgagactggcctggctagcatggcaaaaccctgtctctactaaaaagacaaaaattagccaggtgtggtggcacacgcctgtaatcccagctactcaggagggtgaggcaggagaatcacttgaacccaggagccggaggttgcagtgagctgagatcacgccactgcacttcagcatgggccacagagcgagattcggtcccccttcctcaaaaaaaaagaagcccctttccctcttctcttttcttcctttagtgaactcttctctttctttaaaagtgcagctcaattgttttgtttgtattcatgtagttagtaattatatattgctatgcaacaaatagccccaaaattttgtggcttaaaaaactcaccatgtattatctcagagtttctgtgcaatccaggaatccagaaatggcttagtttggtgcctctgcctcaaggtctctcacaaggctgtagagtgtctcccagggctgaagactcaacatgggacttctgtggttgttagtggaattcagtttcttgaggactgttgaaatcctcactcggctgggagccaacaagtcctctgccgctaggacctctccacagggcagctcataaaagggcaactggctttactcagaatgcgtcagagcgcacgggacatcatgcaagacgagagcctcagtctctttggaacacagagacaggctctttgagtctgtttgtcatctcagaggtaatatctatcacttttgccatattttcttcattagaagcatggcactcaaggctaacccacactcaaggggcagggattacataagtgcttgaatacaggaggaagagatcactggagctgtctgagaggctgcctgctgcatgctgctttctccaggatggagcagctggcagacagagaaagagggaggaaattgtatagcctccacaacatctctaacaagtcttccttaatcttctcctaacaatgtcccagattctgatttgctgctcagaatatgagagctgaaatggactttagaagttatcttgtccactatccttattttatagatgatgaaaaatacatagaaggggtgtatggccttccagaagggataggattatttgcagaatgggacctagaactcaggtcacctgctttttccaagtgaacttcatccttctactctctcccacctactgtcttcctgatcttttacaacttgatcagcattggtcattttatagaaattattctctcaaaggtcacctaaaaacatcttggtcaagcattcaatcatgagttactttttgagttctcacctcttttggcttccatgagaccacagaggtctggtcctggcttctcttagtcctccccctgcactaagcaaaaagttttttacaatatcccagagactcagttctttgcctttgcccttttcctgacatctaagtccttgatggacttatgtggtctcaggactttgacgatcacctctccttgccttgaccttgagttgcactcaattcccccaatatctaagtgccttgaccttgagttgcactcaattcccccaatatctaagtgcctgttgggcgtgttcactgacatgtcaatgttaatcatatataaactcatccatgttagtatgaagacctccaactatcatttattgaactcatatatgtgccaggtcctatgttaagtgctttaattatattttcttatttaatccttccaagaacactctacagtaaataataatcacattttgtagatgagaaaactaggcttagagaggttaaagtgacttgtaggatatcctataacttacaactgatccatgttcttttgattccaaaatttttgcttttaagcactgtactcatgatctccccaaaaccgctcctctggtctgtcttatttctgtttctgttttgcccttcgccaatggattcaaaatcttggagtttaaaacatgctatcatgtggaacacctctaacacctctatgtctttgcatgtgttctttctgcctgaaagtcccctttttctttcttttcctttcttccttccttccttccttccttccctccttccttccttccttccttccttccttccttccttccttccttttctttctttctctgtctctctttctttcttttttttttgacagagtcttgctctgttacccaggctggagtgcagtggtgcgatcttggcccactgcaacctccaccatctactgagttgaatagattcttatgcctcagcttcccaagtaacaaggactacaggtgcccaccaccacacccagctaatttattgtatttttagtagagacggggttttcccatgttgccctgactggtcacaaactcctgaactcaggcaatctgcctgctttggcttctcaaagtgctaggattaggggtgtgagccactgcacccggccccttatcctaatcatcagtatgcatctcctcccctgacctcctcccctctctcctgtcaccacactgccaagattattacttcttccacggtgtcacatggtcaagtcacagtgagcttgaaatttgcctcactggctaggtcttgcacaggaaccaaggcatcctaatgttgaaatggtgccagagaatgcccctatgacagtagctaatccctgagctataatggtttggatatctatgggcattcctctgaacgctatactttatagaagcagagaccataaatgttcacctttgcagctcctgtcctggcagcagacacatggtaacctagtcatctttgatgcatctcattcctttaattcccacagctaattagtagataagccctgcagactgttctttgttagatttttcttatctctttctcaatttcaatttctctagcccccatcccaagtctatgtctcctacctctcatgcagcccattgtaatcacttccaaactcacctcctggccagctccttgctgccttgtccggttcattctgatgatttctattctattaacatttatttgtacacattgcttgcctgctcaatggctccctggtgcctataaaataaagcccaagctcctgatcttggctttcaataatcttcccaatgtaccttaatgacttatcccaccctccagtctcagagtcattgtggcactgtatgaatgacctgttgtagccattcaccatggctttaatgctcctctgagttccacttccatgtcatcgctcatgcttttccttctgtttggaatgctcttccttctcccgcccacatatctgaactgtaccgtgtgttcacatcccagcttaatcctcacttctccaccagccttctctaaccacctgagccatagcaactttcctcatccagtgtaggagaaaaagcttgaaccacactatctgagagctatggatcaacatttcaaccatcgactagttgtgctgctttgggaaagttatataacttcttaggcttagcaaaatgggaataataaaacctatctcatagggctgtggagaggatgaagtaggggaatatatgtgctgaaaggaagttccagttggtgatctaagttatggcatcctaagattcagatggaaccaggcacacctgggggttcatggagtagacccacaatgccatcctgcaccaagaggaagaactcatcatccatgatgtctaagagtccaagccactgggcttgactgaggccatatgttgctgacaaggaccaagcatggaatgaagggtctgggacaggggaccatgcttctcaatttaaactccaacacttctacttagccatgtaatcttgggcaagtttattcacctctttatgtctctctttccttgtttccaaagtggggattaaatatggaatctatttgataggattaatgtgacaataagtgaaacacgcataaagagtttagcacacctctggcacactgtaagcttttaataaatgctaactattatgttttatattgttattctccagcctagtctctatggagtttgctacatcccagggtgacagggctataagtaaaaatggaaagagatgtttcactaatcatccctgggggagcccagtgggagcagagggaagcctgctcctagcatctgttatagagggtagtgtaggtgagaatggtgccacagaaaacagcctaaaactgggtcacccatcagaaggggtagagcatcagctctcagccctggctgcaagttggaatttggtgctttcaacaaatgctgatacttgggcctcaccaccagagtttcagattcaaattactgggctgggcccacatatggattttttttgaaagcctctcaggtgattctattgtgtagctagggttggaaaacacttggtcaaggaaatacagtggtcaaggttagaataatgtgagcagggtatgagggacagagagagaagaggttcagagactagagcagagctgaggggacatgatcccagagacagggctgggactagggtgagccaagtgaggcacccagggaggcaaaatttgtggacagtgagtgcctccttaagttttgtaccttagactcctaacttgcttcaccttagaacattcctgcctagaaacattcctgggggcttgcagcaatgtcttaaatgtttcccatggatgctggtattggttggtcatgtcgtttttgaatcatatatacaaaaagggaaaagactaaatttctactctcattgatcatacatccatccacctacccatctgcctatccatcctttcatccacctacacacccactcattcattcacccatccatccacgcatccatccatttttccattcacccatccatctatccatccatccctccctccctccctccaccatccatgcacatatctatccatccttccatccacctacccatccatccactcatccatcatttataatttcattcatctttctatccacccatcaatcatccattcttctactcatccacacattcccccccacccactcacccacccatttacccatccacccttccatcaacctatccattcatccatccatccgtccatccatccatccatctttccatctgtattagtccattttcacactgctgataaagacataaccgagacgggcaatttacaaaagaaagaggtttaattggacttacagttccacatggtgggggaagcctcacaatcatggtggaaggcaaggaggagcaagtcacatcttacatgaatggcagcaggcagaaagatcttgtgcaggaaaactcccccttataaaaatcatcagattttgtgagacttactcattatgacaagaacagcataggaaagacctttcaattacctctcactgggtccctcccacaacatgtgggaattcgagatgagatttgggtggagacagggccaaaccctatcaccatccatctgtccatccatctatttgtccatccagtcactcctcattcacccgtttattcattgaacaaaaatatattgagagcctattatacgtagacacctttgtgggcatgttgggaattctgtctctggccttatgatggggaagaccagaaactttggagccagggtctgggacagaggggcaaggcaagtgtgattttcccatgagatgcctggtaatttggaagaaagagcaatgactttggcacttaccagttgacggattttgaccatacttcttaacctccccagatgcactttcaaaatttatgaaatgagaacattaggtggtggggatgattgaataagcacctaatcatataaggcctgattcacagtagatgtttataacaaaggccagagaagctgtaaatggaattggaagaaccgtcagactcttgtctttcactttttaatcaattggaggagaatatcagattttccctacctaaacagacctcgtcataaccagagaaacttaaaacttgagattagaaggaatggtcatttagtctcattccctcattttacaaataaagaaacagacccagagaggggcagtgccttggccaaggatgtgtagcaagaagctcaggatactcagtccaagttctcattgcagcatccaggagcagatgcacctctggcttctgctaaatagaaaatcaacctttgtaacaattacggttctgaaactggaattgtcacaatagagacaaggatcaaaatatcacatttcctgaatatctgctatgtactaggcatacataggcctgttatctcactcaacctttataagaacgcatgaaatgaagtattatgattatttcctttattttaccgatgtgggaaactgaggctcaaataaattaagtgattttctcaggaacttattgcagggaagtggtggtgctgggctgggacctaggtctttgtgacttcaaagctcatactctctgggctttacctcattgcctcacttatagaagtggcccccaaataatttataaacatctatgtgcctaggactgtccctaaatcactcatttgaggctaaggtagaggactgatagcatttctcatcatggggacatagttagatcacctgtctaacagtctttcatataatcctgaaaatatatcagaaggaacttcagtgatggagataggcattgggaaatttacctagtccacttctctgcctcctcaagtacctgaaattctgccattagctgttcatttcctggctgatttgcggctctcatcctgaataactagaagtagggatgaaggcactgtaggttataatagctaggcacaagtgagtttattcttccctcccctacctgttgaattctgactcatctttcacggcccagcacaaatgtcatcaaacactagaacttacaacatattccgagtcatccctctgtgctgtggggtaggaatacaaggattattaaggaagcacaggtcctgcctagattgctcactgcctggtgggaggccagctgagaaaatgcacaattacagtgcaaggtggaaaagacaacagaggacacaaacacagaggtgttcagaggggactcccaaccctaaagagggtgggatcagagactatgcctgttgccaaattcccctggaatacagtttctccacccttagttctcacctagcactttgcatgaccctgtcaaagcacttatctaggctggccatttgtgaaggtccatttctttgtctgtcttaggatgtgagctcctttggtagaagtcactctgctctgtagtccctgtaactagcaggggaccttacatgcagcaggtgctcagtaaatgacaattgaaggaaataattagaggaaatatgggatggtctgaagacaagagattggtggcaggattaggaaacttagaagaatgatatagacatgtgaggggagagaagctggtggcagcaggttcctctaaagaacattggatctacttttcatttttactagaactgtccctggggatctgggacagggtagaggccaagagatagcccttggaaccctagagaaagagattcttcagcctcccatcaccccatcagcaaaaggtcagtgcaacaagaaagctcagggcatagctcaaggcctagctggaggagccccattgggcattttccatcttccacttctacaacactttgatttgctcttcatgttgattgagatcccagttttattgcaaataattaactgcatcatattttaaaatcgttctttagtcgaatcttattctttttgagtcacagtgatttatatttgccaaataatgaccttctcaatcaggatcatagtggaaaaaaaatcttagagtgtgaagtttcacatgatggtgggagcagtgcaggggatggaggaactacagggagatgcctctgtctattctctttccttggtgtcctgacactaaccgactctatgtttttgtttttccttggcttgaccaccttctaacataccatatagtttacttatatactgtgtgtattctttattgtttatcttccccttctacattagaacaaaagctccaagaagttaagaatcttttctattttgttcactgatgtatctccagcatttagaatgggccccggaatatagcaggtgcccactaaatacttgttgagtgaattaataaataaaagagcacgggttaacacaatgtaagtttcagaagccaccctggataaagggaggagataacttacaaaatttcaagcccatgacttttggaaacctgttggaaccaagacagcattgggcctcttggtgatgatggtagcagtcattgtggttatgatgctgacgataatagtaaaggtgattatgtggtgatggtagtgatggtgatggttataataatgatgatggggatgatggcagtgatgatagtgatggtggtggtgatgatgatgatgatgatggtgattatggtgatgatggtgttggtgatgatgaagagagaatgaactccctcacccttgaacctcagagtctatggagttttttcacatcattttcactttggtcttcacaaaatccttcagagctagcagcagtcaacatgattgccacctttttcagaaaccactaggatttaaagtgatgaagtgacttgcccggggctacacagccattgaagacagaaccaagatggcaactcaagtcttattgtccagaagaagctaccatttactgatttcctcttgtgtgctaggcatgctgcaaagggccttgttttcctcttttctgggaatttgggagtcatagactgggacatatcatcacagataccttggaagtgatttagcttcagatagtgatgctgccattttgtggtggccattttctactctgtatccagagaagcagagaaaagaaggctggagggagagagaagaataccatatagagatgagcaaagaggaaggatcagatggtcccagggaaagaaatatggggttggaggtgctgtggtttctgatgctttcctgggccttgagttctgtccttcatgaggcccttctttctctactgcccctgggctctacttataaatccaacttcacccaagatggcattacaaggaatatgttcacttcaaacaaaggatctctgacaacctgtttgcttagcccttaagaaatcaaccagacaagactcctttgctggaggatagccaaaggcacactggggtgagggacgatcaggaggagggcttgtccttgcaattcccagtgattacatcccccttccccctctgtctccctcttctacactctctcctgacccagaccaacccactcttcatccttgggtggtgttgggaacaacaacaaaaaatctccgatgaaccatctaaatcccagtatggcctgttccccacagcatgctggccaccatatgcaggcatagtgtccagacctcatcagtcactatgaatcagcttctgctttcagtgtggtcacagttttgtgatgccccttccccttaatctcatcataagcatccttttcccagcctcctggcatttctgatgggagagaaagccacaggcagaaagccttgcccaagagttagctctcctaaaaggagcgtgtgtgtgtttgtgtgtgtgtgcaccatggtagtggtgggcaggaccacaccgtctctgggttcagtgtggccaccattccaccctacatagcacttaaaacctcatttctttggggaatagaaaagtgaactctgcagacaagcctgggaccctatctgtctcattagttaacttcccaagaaatttctctgagaaggtaacaaaataagcagacctgggttaccatagagacctgtctgcacaggtctgggccagatgtctgttctggaccatacattattaatttcttccttgccagtgaggaggctggtctgggttaaaactgcaaaccactaaatttggtttccccaccaatttctctcttttctcctcaaactgcaaagtcatcttgaggtaggatatatggaagggacctgtgagatgggggacaactgattggctgaggttctctgtgtgtgaggtgccagactccatgctccacctatgtgtccttgttgaagatctcattataaggaagaagcagtgctcagggaatctgtcagggtctaaaatttcaacaatgtggactgtcttcagaccagtcttctggtatgggaagaccaagcaaaaagaagtgagcttagaggacagtagaaatgagtttgaggggaaggagctaaagagaaatgtggagggtgaatgttggctggagtagatttgtgtcatttgtgagtgttgatgacctctccgactctactcccttcttgaagtatacctgataatagggagatttatgagccagaaatctctcttttgggaaaaactggagcttctattctgagagctgaaaaggatctagcatcttcttagaaccatgcaagcagcatacaatcaggacttaaaaaaagatcatttattaccatttgattccattccaaggcctattctatgcaaaccactgtccaggggctgagaattcaagttgttcatatcttccctttcacctgtcctcactgttgactctttctggttcctacctgccccctatccctgccacccctgccacccctgccagcctctctattacaaacaggcatctctgttttcaaactgcctataggttgagttgtgatggtttggcaacagtttggtgacaaacacttccaaaatctcagtggattctcagtggattaaaacaacacagatttatttctcacactgcacctctaaagcaggtcactggagagatgccatatcgtcgtcactcaggggcccaggctgacagagagttggccatgtgaatgacatcgccgtctcaacactctaacagaggagaacacaaggggaatcacatgccagccttgaagtgcttccatccgggagagccacctgtcacttccactcttatttaactggccaaaggaagtcacacagacatgcctaactccataaggctaaaaaagcataatcttcccttgtgttggaagaagagaaccagaactactggtaagcactaccaatgtgtgcttcgccatctgtaatctacctccctaattcctttctccccctcttccctctctgatcatcaatctgaactccattccttgatcccttgccattgtagtgttaacctcttccatcccttcctttgcctccatgcccttctccctaactctgccacctgctggctcccctcctgccctcctttgtctgttttccacccagcccctgatggtcatgcctccatcgcttggctgcactggatagatgtgatggaatacaacctcagctctaactctgcaagtttctcttgcccctaattgagcttaatgatttatgtcttgtaatggacacaaatgggcaagaattcctggatctcattaataattttaagtatgccagaagtaggattttaaatcctaagcaaaaattaaatgaccataaaatctttgttcgcttcccaggagacaatcctgtttcaacttgacagcttaattaaatgctgggtaaattggacacaacacttaataaacaggacttggcaggcctggaaaggagagagcagagaggtgaggatgggagaaaatgaagctcacaaagtaacaaaaggaaattaagttatgcgaggtctctctcccatagtgtgacctttctgggagcttcagatatgtttaaatgacacgaatgacccagaagattgtgaaagaattgattctcttctttgactccaattccctccatggccatattgttccacaaggcaagaaagctgttgtccagaaatattcttggaggtctttgcaagatctcctttggatgtttgactcctcctggaccaagtttcttgcaagcctcaagcccactgggaaagctgctggtaggctggagctgaggggttagatctgaggggccacactgcatggagggctccatgcacaggctcatatcttagtcttcatattttcttctactttatggtcttgccttatcctggataaggctttttgatcatgactttgtttattttattttatttttttaagttccaaggtgcctgtgcaggatgtgaaggttttttacataggtaaacatgtgccatggtggtttgctgcacctatcaacccaccacctaggtattaagcccagcatccattagctcttttccctaatgctcttcctgccactgtccctcaacatgccctagtgtgtattgttcccctccttgtgtccatgtgttctcattgttcagctttcacttaaagtgagaatatgtggtgttttgttttctgttcctgtgttagtttgctgaggataatggcttccagcttcatccatgtccctgaaaaggacatgatctcactcctttttatggctgtatggtattccatggtgtatatgtaccacattgtctttatctagtctatcattgatgggcttttgagttgattccctgtctttgctattgtgactagtgttgcagtgaacatacgcgtgtacgtatctttataatagaatgatttatattcctttgggtatatactcagaaatgggattgctgcatcaaatggcatttccagttctaaatctttgaggaatcaccacagtgtcttcactgatcattagagaaatgcaaatcaaaatcacagtgagataccatctcatgccagtcagaatggtgatgattaagaagtcaagaaacagcagatgctgctgagattgtggagaaataggaacgcttttatactgttggtgggatcaatcgtgactttgtatggtcaaaatatttccatctctactaataatcagattctttagattctgctgcctctaccataaacatatgctcagcctgggtcctggctgcacacctccattgctagtgaccatgcagggctcaccaagagttcatgagtgcactcgggcagagcctgtgagagcctttggttactattctctttagcatctttagcagaatacaggtgtctcatcatataaatacactcacaatatattaatagaatttgaagatttagaggtgggcacacagcttctacctccacttccttcttcccttctgccttctcctcagtcagaattactttcccattaacatttgggaagatcatatctcttctccatcagttgtctagctgggttgagcttatcttgcatttgaagtaatttacttatgggcagctgccacatgctgctttagttaaattaagactgtctatcttacttgcacagaaaaaatgttttaaacaaatcaagagattaaaatgtgtttaaaagtattttattcttcagtgaaaagccttgtttggtggaattggctacaagcccctgagtaagtgaaaataatcgctcagacaggtgtgggatttgctgtacttagtacaagaaacaaaccttccttcatcatcagggaagaaaccagccttcctcatcaagtaaccaacctccatcatcatttgacattacccttttacttctattaaagaatcttgtaaacctaaagctagcagaaaccttggcaatcatctgggtgaacagtttacaggtgaagaagccaagctccagagagaggaaatgacttttccaagccccacagtgaattgcagctgggacatcagaaagatggcttcatgagtcagtgaatgatagtaacttacagagagacccatggacttgttaatagtggctaccgggatttctagcttagtgcaatgcttaacttttgtgaagtcacctgctacatgaaaacaagtttcatttcttttgcactgacttccataaaacatagagagatattcgtgtttaaaagacctcagcagcttgagttgccaagtttgggaaaggaaaggttcaaatgatagagtaaaagactaggcatgcttagtggttgctagaactggaggtggggactaggagtgactgcaaattaatgaacatgggatttgtttctggggtgacggaaatgtgctaattgattatggtgatgattgcacaactctgtaagtttactaaaaattgttgaattgcacacttgagtgaattttgtagtatgtaaattgtatctcaataaagccgtccaaaaaacaaacaaacaaatgaaaacaaagtaatgcaaaataaatacaagactaagagccagggctcagacaacactttcaggacaagagcaaggtagaggatcaatcctaggcctccagattagtttgcttttagcctctcaaaggctgtctacttctggacagaggagcaacatctgaagcagatggctcaacttccaatcagttgcactccagacccttgcctaagagctcagttttgacctgacagctcatcagctcctgtcaaatgcatgttgagttgagcgacattaagagggacaacatatgcatcctgttaccatgcactcttctgggctgtggaaatcccagagagcagaatgtttgcacttctttagcctagatacacaaagaaatattttgccactgtcactatattattgtttcagttttatcaaagttcaatgaatgaaatgaccatataaagatgatataggtatttctggctattatattacccattatattactacttgatgtcttttccatgtgacccaatatagcaagtaccctatagaatttagtaccaagaaaaaatgttctgtcctaaaaaacttgaatgacttatttgataagcagtgggagctactgaacccaggtggcttatttttttttttttcttttttgtcttgaacgccaggacactctgggctaatgttagagtagggggacaggcatgtgcttgtctctgatacaactgttttccatgctctctgctcagctgcatgcctctctgtcacattcattcattcaattatcaaatgtttctcaagggcatcatatctccagagttggaatgatgaataagacctggtctttgcccccatggaggaggcagatatgggaatcattgcaaatagaattgcatggtagggggctgctttggatgttatgggattagaaaaaagggacaataggaatagaaaaatggggtacaactttccaaagtagtgtattaactattttttcttactttctgtattattgatgctctggcatttgtgacctcactaactggagagagatcacccctcccaggactagccaattcttagagatagcactcctttctttctttctttttcttttttctttcttttttttttttttgagatggagtcttgctctgttgcccaggctgcagagcagtggcgcgatcttggctcactgcaacctctgcctcctgggttcaagcaattctcccgcctcagcctcctgagtagctgggattacaggcgcccgccaccacacccagctaatttttgtatttttagtagagacggggtttcaacatgttggtcaggctggtctcgaacccctgacctggtgatccacccgccttggcctcccaaagtgctgggattacaggcttgagccaccacaccgggccaagacagcactcctttcatatgtaaactaaccagttcagagcccataccctgaaccatcttctgtttctggctcttacaccccaggagacaatattcctccactccaatcacccaggggccaggtaccagacagttagagacgaccctgccagcccgagcctgcgagcattatttacactagccaatcacaaactttcccctgccctgcctttcccatggaaaatgcaaaacaggctctttccatgaaaaaaaacctgggccaggctttgccctggctccttctgcctcctgacccaacctggtgttttccactctggctctggtgtgccccttcctcttgggaaatgtaagtaataaaaatatttcaatgtcattggcctctctgtgtcataaaatctgtgagtataattgatataggtaaagcttgatgagcaattgggaatttttcaggggtaagaatattccagaagcagagctcacttatgcatcagcccacagacttgatatgagaacattaaggtgctgtgtctgatgcacattttcagctctttcaaggcagtctgcgaacattcctctttcaatgtggacggggcataaattataaataatgatgggtgggccaagtcttatttgtacaagactgagttttcctcaaggttctgattgctctttcttttgttctgtcaaacgcagaacacagaacacagcactgtgcagagctggaatcccagcttgctctcttattagctgtgtgtccctgtacaagtttttaagctttctgtgtttctgtttccttgattataagatgagaataacaccagtagcctcctcagagagctgccatgaggattaaatagattaaaatgtgtaaaacatttagaacagtggccagcagatggtaagggctatgcaagcatttgctaaattatgttctgaatcctgcaatgtgaggagtacttattaagaccatggaatccataaagatgtggaaggtatattcctacccctaaagagtttacaagtataatgagagcctagagaattctggaaaatcaaaggactgttcaggaaactgtatttgcagaagatgttgaaaatgatgaaagttataatagactaatgttttggcctttctccagtctcaaatagagaaggaagtagagaaagtgaaacattgtggaaagaatgccagattctgagtctgaaagacttgagttcaaggtcaaggaaagctggcttcctagagctaccattttctagccatgtaatttagttatttagtttctctgagtcttaatttttttcacttgtataatgtagataatattatctactttagcaggtgggaggaaaagagataatgatagcaatagctgacatttattgggcattcgccaatgtgttgggaattgaactaagagttctctaagaaaatcatcttggagaaaaggacaatgtctcagtgcccaaggtccctcaataataactggctgatctgggatttgaactcagacactttgattccagggtttgttctaataaccattattttacactaaatctctcagaactgtactagagccagcaggcactcatataataacaaccattgttattaactgtgtagtatctttgatccattcggctaatgcctcttgatcactttaagactcccttcaagtgctatattttcttcccatccccagaaccatcctcctgatactcccataatgcatcactcagggcaagtatgggcctaattctctaaaattctcaactttatattttcttcaagtgatagagaaaagaggaaaagttctataggatcccaggtacattaataaaaatttaataaaataaagttagtaatgaaacagtctgattagagaaataatttgagcttcaggcctttgcagatggggaaaattagattggataaatgatttactctaaatagatttaatgcaaaaacattaggacctgcaagacaagcaagcccaaggaattctgggaaccaggttgggattggcttggcttggtagcaaccctatagtctctagccaggtcaacttaggtattggatcaaatgccaggccaggacagggagtgtattggctggcaacccagccaatgagaagtgcctaatggcttccaaatgtcagcatgatgatgtcacttccaaatccttcctgttcatggtggggaggcatttggggccaccaagaccacaccagttccaaatctgtggcttccctgccctttagaagaagtgtgccacatgtacccgacagccttggggaatgacttctcatgagtttcctttcttgctcagatcctgggcagagtttgacatgcaggagatgctggtgggacctatgcacattaatcaatttggctgaattatctgtaaaaaagagagaaactagcttaattcaataaccaacgtttgttgcattttgtggctttccttttctgttctgattttcactccccaacaaatgtcatgtccatgtgctgcagtggtgagaacaccaggaacaggaagacttggttctgtctcttccatgctgggctatggttgtaggtgaagggtagtggggagggcaggatacttcagtacaatgtagtgaaaagaggccagacgtgggtgtgaatatgtatccggtacttagctatgtgagctcagtttgtgcatctttaaaacacaggataaacattaacttaaaaatacaaggcatatgtaaaatgatgctatagtaggtaactcaatttttaaaaagttattcagtatttattagatgcttgacaacacacacaataactatcctcccttttctcccctttctccactgagtaataacgcctttatcctccactccctggatgaaaattcatgataaacaaatgaacaaacaaacagtagatttggagaagaggtccagaaaccacagagcaccaatctgatctttgcaaaacaatcaagaataccttgatgtctcgggtaaggcagtggagtggaaaagctacacaagtggggaacgaggggagccacagagtgagggatgagagaggacagggtaaataaatgctcaagcaatgctcagagagcccagggaagagggtgtgtacagacagaatattccagtcctggctgggcgtgatggcccatgcctgtaatcccagacccttggggggctgaggtgggtggatcgtttgagctcaggagttcgagaccagcctggctaacatggagaaactctgtctctaccaaaaatacaaaaaattagccagaagtggtggtgtgcgcatgtagtcccagttgctaaggaggctgaggtgggagaatttattgagcctgggaggcagaggttgtagtgagccgaaatcatgccactgcactccagcctgggtgacagagtgagactctgtctaaaaaataatttttttaaaaaaaagttccactcctgcatttcctccagaggtcatcaactccaatattcaaggcatgagttcccaaagtgaggtgagaggcatctgcagtggggcatcagcacagaaactggagtgaccttcaaagagccaggtgctctatgtagagcccttccttcccaactttgggagagactagggatcagacttaacaccttgtctgagaaaactccaagggtagccctacaataaccctaacactaatgttaggagtttggccagaactggagagaatgatagagatgcgtgaagttggcatcagccttgtctcagtcatggtcactgtactcctattctcttattccctcacccctccaccaccaattaattcatccagatcaaatagaatcgtggttaggagaggagcgtttgcagcaggcagcagtatcttctgaagttctggtaaaggagagtcttgcggaggaggaggccgagggagctggaccatttgtcttatgtgtgggggaggggtatgaatacagctagaatagagcctcagaaatgaatttgagcctggctttaggaacaactgatcctccaggaccccagcccagtttgggcggcctcttggccaagttttgttctattctagcactgtttggcttgattcagcccacccccagtttccacttgtccaaatctgcccagttgatccagctcaggccaacatacaccagtacaaaccagctcagggcagctcattctggacccctcagcaggaccgtgtctgttccattcagttacagtggctttagacttacagttcacaccattgaggatgtatggaaattggcagatggtcagcctaggagccagcttcaaagatgatgatgtgatatgttgtagccacctgagacaggtagcaatgaggctctaatcgctgactcttctaagcctggccactctggatatcttcttaccagataccatttccagcaacagtgggcaaaatgatgaggggccacagcacccagaaatcacagccccggaacatgctgctctgaataaaaaatgtgtgttttgtgctgaattggacaccctcttatagtagactctcatctagatgagtaaggggtactaagggtttagaaacgtacatgagagaagaacatatcaattgcaagaaacctatctttagcttattatttctctctttgaattgggaaaaaaattaataatccagcttaggtcaaaaacatatccttctgcagatcagggcttgagaactactgcttctggagggactcaagccccctcggtaagctgccctcagccccatgcctgtggctcgtctccagcctcccagcccatcccatcagatcaggctgtagtctcagtgcttgtccttgccatgaggccctcgtgcccattcttctccccatctgctgcctcctttctgttagtcttggactcttgtattcgtcaaggcccttccctaagttgggtgccctcaagtcactcctctcttcatccatgactgttgtactgtatcatctttgtgagacaggcaaagttgtccagcatagtaccttttcctctgtagctctttgtgggatggggatggttttgtaaactctgcaagagcagatgtttgtatccagctggagatgtctaggattgaagtggatgccagtagacgcttattggaactgtgtctggcacatagaagacagcataacatatttgtcagatgaatggatgtgtagtgagtaaatgagagaacaggagattgaataaatgaatgaaggataagccaatgaatgcaaaagaaagtgaaagcatgactaggaaatggtgaaagaatatgtgaattatgagtgaatgaatgaatggccatgatgcatgaatggccacagtcaagttgatgctacagaccacaataaacataggctgctactccaggctggccaactctgtctgagctagtgtgtgtggtcttcctggcagccctcctcagaatcctcattagaataacaattttctaccctattgttttgagtttggattatatggttgttaccatttgtcctccagtgattagaaaaactttgagatggttaaaaaaaagaaaaagagcttctccatttgtgaacccccaaatgaatatcattgcaactcaggccagatttccagaactggactgtcattatgtcaatctgatgttaatttaaatggtaattggatgagagttttcaaacagcctcccttactgggcaagtgagccttcctgctgggctgattttggaggaagagaagctggcaaggaagggaaaggaaggtattatggattcttttaggcctggagtgcacccattcatctatctgctccagtgggggtacagatagcagtttgatattgtagttttattccaattcagtggtttaagaaccagaggggcaataggaagaaaaaaatgaagtcttggcatttacagagtcaggcttaaggaccagctttaccattgactgactgtgtgattatgaacaagtgactgagcgaggtatctttggccagaccatgatgagtctcagcttcctcattgtgaaattggataatcacgtccactttacattgcagcatcactgtgagggtcaaatgagataaaagtgacatggcttcaccaactttagggtgtcataaataaaagagatcgcaatcttatgagtagccatccgaaaatatttggttagggtttgaacaaatctgtgagtgctatggtttgagtgaaagctcaagaaaaatgcaaacaaaacaaaacaaaacaaaacaaaacacaaccaaaaacacacaaaaaacaaaaaccttgaagctacatcatttgggcactggctcctcctgcttattatttttgatttgttcaatctgagccttcgttgggccagttttcatcgctccttgatcctattgctttttctcaagctaaaaagaaaggagagaagagtttattgtatgactgcccagcacaactgtctagcagctcaggccctatcatctttgtaccaacccacgtggttcttagaatgctgttgatcaccaggatgtcatgaattatgatggttcctgttctgccttcatgtggttcatggtaactgcagaggggtagagagggggtgctgacttactgtgagacttcatgggtgaggcactgggctaagcatttcacacgtgtggcctcctgtcctccctatgcaacagtccttgaggtccacattaatcttcccttgcagagaggaaggctcagagaagtcaaataatttgcccaagatcagacagagaaggagaggcacagtcagaattaaaatcctggtcttgctgaggcaaaactatgaaatagtcatgatgaggcaaatgttctctgttttttctgtggcctttgggctggatatatgcctatcttgggttgagtggataaacataggcatagaggaaggctgcctggatcatctttcctgcttctgagagtgtgagaggagcaatgagaagtgggagagacgttggtgccctatgataggtccaaggccagagagataaaaggaattgtgaatttgcacgcaaagaaggagctctgtgcaactagcagtaggtcaggaactggagctgtgagaggagccggggtctggtttagctaatggctaaaccagatgagaagagcgtgcaaggaaccccccacctgctgcccacagcaaagctaaggtgctatggacaagccgctctgtgctcttacttgttcccaatgaggggctactgtctctgtgccttaaaggcacttggcttctgaggactgaggctgatgagcagggttctccagagatgggggcatagggggtgccattgaggagcatcacgctttcccccgagatgtgtttccaaggttcttggggtcaagtgaagtgtgacacagcccccaaatcaggagctctgactcagggataaggtcttaagtgttctcatccgagacttgaaagcctcagcagggaattagcaaattcattcattaatggcccattgacatttctattataaagactaatcatttgtttttattgagagctttttccttgattaaagccattagcaccaatgagtaaccatcaatcaatcaacaagctttcttaaatgtccccaacttggtccgattgcagcctgaatacagtcaattttacctcctaactatctctccaagctgcccacttctctccctctctgttgctgccactctggtccaagccactgccgtttctcaccaggactacgctgatagcctcctgcctggctctcttggccaacaaggcctcgcctaggcccttttatttttctccccagcatcatatcctgccacgcccattctcccagtagccttttgcatcttcatactgtctactcctttctgcagattttcacatgttcagccttggcccatccttttcccagccttggcttcattagatcccactcactctttagctctcagctcaaatattctttctcagagaaaacttctatgaccccctgagactggatcaggcccacctgtgccctctctctcccagcactctgccttgctccttctggcactggcccgggttattttaggggtttgttcatttgattcttaggtttctccctggcatgcaagctctgcaggggcaaagagcactctattttatcttatcttggttttagggccaggacttggggaaggcaggcaagttgcctaaggagcatcatttgaggagaccttcactcccagacatgggccctgagcttgcagtagcccgagagtaggtcctccttaagtcttgttcccgcagcagcccagtggcctactcttgtcccacccctgcgaggctctccaacttaagaccaacacaaggaaggtacacgccataggtacttgttgagtgcatacattggaggcaggaagattaagaaaaggagctagtcaggaggctgcacccaaagaggaggggagagtggaagaggttagaccatgcagggatggcgaggaggctggagggagcagtgcagagagactccagtaggtagaaaagagaggatgcagcgatggtctgggtgtggtggaacgaggaaggggatgttctaggttggcaggttggtaatgcccattggccaggggagaaggaagtagaggggaggaggactggagcagtgggaggatgaagctgagcaggctatctattggctagttggctgggcagttcttcattgttcctaccacggcagccaccgactgggctttacctggacctctctggagggggtcaaggcctgccttggggctctcctctttctcagttaccgctaggctcatgtgcccactgaggccattgggaatctgagggcaggtgctccagggttttccaggactctgggagagggagcaaatcctggtccttaacaaggtccatcttcactgagaatgctgaacacgtttcatttctcttttaaattttaatttggttctgtcactgaaatcacattaggccccactctgctcttcaaaatgacatcttttaatgttccccagatatgcagatcaaacaggttccaaaaagcctcttcctctcccctgaccccgcttctccatggctcctcttccttcctctactttcttctaatcaggacatgcagtttggtttcccaaccaggctactgctagttcagataccctcctcacatgttggtgggactgaccatctgactgtggtattcagatgtgcagtccaggcactgtcctcatactagtggagggcagtcataccaccctgtggggacatggatagaatctcagccttccctttggctgcactgattgactctgtgactttaggcaagtcacttaccctctctaagttttggttaaaacatgacacttggactagaagatttgacagctttcccctagagtcatcgcttggaatctacacagtattggcccaggacacctcagggacatcaaaatctgtcgatgctcgaatctaatatggaataacattgtattttcatgtaacctacacatatcctcccatatactctaaattatctctagattgcttataataactaatacaatggaaatgctatgtaaatagttgttatattttttatttgtattgtttttattgagttgttatttttattatttttgaatattttaatctgaggttagttaattatgtagaacccatgggcatgtagagcccattgtattttcatttgagagtctttggatttttctgagagagagagagaattcatttagttcaagatggtccaaatccctcgctgcccactgacttcaagcctgcagcagccagtcagtatgctgggaacatccggggcctcatattacacactggagctaaacacaagatggggatcaagaaggagagacagagaaagagagagagctggaggggagagagagagagagattaaaagaataagatagcagagagagcaaagtggatgaaagagaaaggattctgatcatgttttctttgtccccatgatgctgagatgctgcagttagacatcttcttgagaattgattgaaaaacccaggatacttgaggagaaggctgtactcctctctgttccgcctggaacctgtgtgggcctggcggaggcagtggcattgagctgcattcaataaagaaattatttccatggcggtgtgaggccagctgcagcctatgctcagagcagggagtggtagttcatgccattctatcaggcagcacctctgggctcagtgctcatttgctgaagtgtgttgggggtggttctgccttgcatttgctgttagcacatgagagttggctgagcctggctccctggtatcagtcatgcacatgttctgagatgtgactatgctggaggtcactcacacacccaattcacacacccattttatgaggccagaatcaaggctgaagctaaaaccacatggatttggaaatcttaacagaagcacaattcattaattttatcattgtcttccctcactgaacaaattgaccaagcttgcaccattcatcatggcagttgacatccacacttcctcttttttcgatttgcactccagggtccttgccagtgaataactagctcgtggcatcaccaatcttctctgcctcctcccatgggccttcctctttgctgactggttactggttttaattttgagggtctcatgatgcctggagggcagtccctgataggagtggtgggggtaaagaagtaagcctgggatgagctactaaccagggcaggtgcttgtctgtgcacccactgggcgcccacagtggcagctgagggaggatgggtgatgccgttgtgggaagatggcaatggctttttaatagctgggggcacccctcattcatctgcacatgctgagtttattttgccatttgtcaaattctgactctaggggacctaggtttggagtggttcaggcttcaagattgatgacccgagtggaataacaagtcccccttctcctttaaataggtggcgctgccaagaggaagctccatggcccgctcatctgtgaaaggtccatttctctacctctgtagaggctggagatgaaatatttatttgggatctcaccaatatgccacagcctgcctccctgcccatgctagacagtgagaaagcttctaaatgagcatgaggcttaatggcttaacccaggttccactttgttaaagagaggaaaggaaaaaaaaaaggttccagtcctcctctatttggagaatggatattccttgggtaaaagcagctctttactgaggctcgtgttcctctagctgctgcagacaggcctcgaacacacacagactctagtaggacgctggaggactagggtgttgaatggaagcaagcccaattttcttaggcaggaagggacatttcttagaatctttaattcccaggggttataaaatcttaaaaatccacccagttcaagcccctaatccttaaaaccctgccagaacacgtctgtctataattgaatgcttccagtgatggcaaaatcaagacttcctgaagcagattattccttatatggaataatctattgcaagaatttcttaaataggattgaaatctgtctgtctgtagcttctacctacccggccaagactacccgggaaacacacagaatacattcattgctcttctccttaatgcctttcggtaaaaagacagtgatcttgtcctctttgaggcttctttcttccaaatcaagtcctcagtgggctctttcatgctaggcactggggatgtgaaaacaatggtgtccagtgagatatgaggtctgtgcctcagaaaacacactttcctttgccatgctggttgttgaggaggacatctgcccatgcctcttccaatgtttccgcccctctgcacattcccctcctaactcacccccaagagaggacagttgccactttatgatccaggacactcactgggccatgttttactaacgaggaagtcctctgtgggtgaagagtccacaacatctgtgtgatgtcccctttgctgtctggctgctgtgaagtgaggaggccaggcaggactggagtcctcagggaaggcccgactaggctttctctgttctaccccttctgtgcttgcagcccagtcaaccctattttgttgacccagctatcttggaatcgggagccagaggccccactctggctctcagcatgtatgtatgtgtgtgtgtgtgtgtgtgtgtgtgtgtgtgtgtgtgtgtgtgtgtgtgcagccatgctccagtgtgactgtcaagcacattaaggactcattcagctgtgaaaagatattcttgtttatcttgccagtcatctttgggaataacttcctagtttgaaactccacagtgcagagtagatattgaagggtaggattcaggaatttatgggtttatgacttaataccacctgtgtagcaccaaaccccatcctaatcttcagtttccctgtgccacttgaagtgtgacatgcagaattaaacgaaaacctaccttgaaaaataaagttgtgctccctgttaaaaaaaaaatcccatttgtcaattttggcttttgttgccattgcttttggtgttttagtcgtgaagtctttgcccatgcctatgtgctgaatggtattgcctaggttttcttctagggtttttatggttttaggtcttacgtttaagtctttaatccatcttgagttaatttttgtataaggtgtaaggaagggacccagtttcagctttctgcatatggctagccagttttcccaacaccatttattaaatagggaatcctttccccattgcttatttttgtcaggtttgtcaaagatcagatggttgtagatgtgtagttatttctgaggcctctgttctgttccattggtctatatctctgttttggtaccagtaccatgcagttttgattactgtagccataaaaaaggatgagttcgtgtcctttgcagggacccggatgaagctggaaaccatcattctcagtaaactaacacaagaacagaaaaccaaacaccacatgttctcactcataagtgggagttgaataatgagaacacacggacacgggggaggggaacatcacacaccggggcctgtcaggggtggggggctgggggagggatagcattaggagaaattcataatgtagatgatgggctgatgggtgcagcaaaccaccatggcacgtatatacctatgtaagaaacctgcatgtcctacacatgtaccccataacttaaagtatggtaataaaaaagaatcagagacatcagagaaagagggagcccatgccttgtctggcagagacagatggggaagtgttgttgcacccattggtgcccctcttccttgccccagagggagcggctaaggtgactcataaatgtgtgctgggtctcctctctatcttggctgttgatctatgggcaatgatgggaagcagcttagagaaaatgaactgaatgtgtttaaagaaataatgtcaagaggtacgcccattgaggctcatttgagggatgaaggatttgaccaaccccattcccaggcggcacaaagcttgtcagttctgtgaatttctgggagtttctggaactattgttaatgtaatgacagtggcttctaatgccagaaagggtgaaagtgagcaataggtaagaatgaagaagcagataaagattgctggatggataccagcatttcaggtctctatgtgtttggcagaaaatacagcaatagctattgaattaaaaacgtattactctttgatccagcaattcctttttaaagtatgtttttcacagatatactggtacatgtgggcaaatatggatgtgcagggatagtaattgtagcatttttggtaacatccaagacaggaagcaacttaaatttccatcagtagaggattggtcacataaaatatgattcatcaaaaagatggactaacatacaaacttgaaaaagaatgaggttcatctagtcgtgttgatgaaactatctttgagacatattaaggaaaaaaaaaactacagacagtgtggttccatttgtgcaaaataaaatggtccattcacagacacaagtgtctatatatgtttagactttttctggaaggatactcataaaactggtaatactgtttaccttaagttgggagtggtgatgagggaataaggaatggggagagaggaggctttctttttttcatatgccgtttcattatgtaaatgcattatcataagctgcgctatatttccaacaaaagtagttcataataaaaagaaagcatatgccttctgcacgtctgctagctgctgagcttctcattgccccagatatttattgaacacccattgtttgcaggatattctgttagcccactttggggaggaagtgggaaagctatggttcatgctttcaggaaatgtactgtccagatggagaaagaaatgtgtgcatgcagttattctacaagtctgagcagggaaaatggaatcttgattagggaactgatgaagattttatgaagatggcttgtaaaattttggtagtggaattttaagcctcacaaatggatgaacggggcacagaattccagttggagagaaaaacatgaactaaaggtatggagtggtaaatgaaaagccatgtggtgtcaccttaagtgtaccttctcatctacttatggtactaccagaaataccactttcttttgggttaaggtgttgtttgctttcaggagtctttgtgagaatacagatatctgcttttgattgagatataagagaatagattcagggagggtgctagtaagccagtccacccccctccaaaatagtttgaatttgtagcatttgcctatttccaaggggtaaatattgctcccatggctgacttcaagctaccaacacagaatgggagttgggacgggatgtgcataagggttcctttaagcccaaaagagctcactccagcctgccatgccacaggatgaattagaatcccagagtcttggaaataaaagtggcattaaagagagtttaacataaaccttagctacacatgaagaaattaatgtgtttgcacaacgtctgaggaagtggtagagttggaacattatcttctagttcttggtttagtgaagtttctacttttccttggaaagcactcatgtaatggagggaatggaacatggagcagtgtagttttggtagaacaaaaaaggtcatgaggagaagcaggagcctttctcagagagagcagggtggggtcctagaatagaataggtctttgtcaccaggaaggttctgtgagctggggagctggggagcaagagaaaggaccacagcagggaggagggggcacagtcaggagaggccttaggggaagggattggaagacaaaatttccagctgcacagttttgttcaggactaatatttcttcccaaaacagggatgtaatgagctgatctgaaatatgggaaagaaaaactgggcaagtcccatccatatccttgatgatctgtgtgcacttggggaagtcagttctcctctgtaagcgtcagagctttcctccttaaagtgggccccgggaaagggggctagtagatggcttccaagaaccttccagcgtgacagtctttgtggctgtgaatctggtttttcagtgaagaagtcccaacaaccattgcggtaaggagttgggtagaatgggtgcagcaagttgcattgacttattttttactttatacccagtttggggtagacaaagagaaatcagagcagcggaaggcaaaagtgaggtttgtttttcagtttatggtagggccaggaagtagaaaatggatcagggaagaacaggacagagaatcctctttgttatgtcatgcatttaaaaaatgtgacagcccatgctgttcttcagtggaaagccattgccttcagtgcaaggtccaggttcctttgcacggtcatagagctctccattttctgcccttgcctaccttcccagtctcctctcctgggtccctgactcctacctccctgtcacctaaccaacactaaccaagcacacgttgcttcctaacagcctgaaagtttgggggcgccagcctttggacagacctcgacttggaatgtttttcccaactgtatctgctgggcaaacttctattcattcttcaaaatcctgttctagcacttcaacatctttcttaagcctttcttacatgacagcctcttccctgacctgcctccagatggagaaaatcactcgcttcctgagcagctgcttctgtaggcatgccattttaatggcaatactgcaatttcattgcaagttctgtttttatctcccccatttccctgtgaacttctcaagggcaggaaacttctatcttggctcctgaggatgaaatgagctgaatggtgactggctcccagatgctggcagaataaagcagagaagactgctcctgtagcaacccccgtccccacagctccaccctgggaaagatagagtagggcatgccaggtgatgcaaagacttttataaaggctgactgggagtgctggtctgccaagttcctcaaaccgtttttagctgagcccctaagggaacttgagtgaagctctgggtgggcaggagggttgcaatgccatcgtagagtgaggtagttgacagtcctgcccatggcggctccatgctgtgctccagtagagtctctccaactctctggaaatgagggtctttcctgggatcccacacaaattcggccctctgctaagggctgatgcagatgctgtggtacatcactcagataccccttcaacacagagagacttaatcctaatgcctcttttttcctctcacaggtgctgatctccacaccaggatctaatcaactgtttgcatgctaatctccagcccagactcaacctatgaggatgtcagtctgctgctaagggctgctaagattagtggactggtcagagttggtatacccgggtgatgatctctagggacagtggtaggaactgagactaaaggcaggaaggtgatgtcagcagagcaaccaagagagtcacagggagaactgggatcaacagaggtcattagagtgccgcacagccctggccaccaagcatcagcctgccatggccatctgagatgcttttagctgtagtggggaggtggtggtgggagtgggtcacccttcagatatcacactgttgggggctcgcaccagcatggatgttgtgatgcatgttggcctcggtcatggccatacattagactcacttaaaaatactgattccaggaccatgccttgagagatactgatgtaattgatctgtggtaaggcctaggtcttggtatgttttaaatgttcactggggatttctaacatgcaactagaattgagaactaccggtatggtgaaaacatgatgagtgctggaatcagagttgggtttgaatctggtcctatcagtgactggggaactacaggctgtgattaattattctgagcttccatttcctcatctgtaaaaatcatgtaaataatgtgtatttcatagaaatgtcataagggtgacatgctactagtaataacactgatggtgataacagctttcagtccatggagctttttgtgatcaacattattactatttgtgttcagacttagctttttgtccttccttctccagggtgtagcaccctatggtagacttgccttccttagcccctactctactgtgagggagtcctctctccttgccctggtttcagctactcagggttcagcaaattggctgctgcagctcagtggaaaaccagtgactctcttggggttgaccagatgaccaaacattggcacccatgatcacactcttgttcatatccagaacaactcatgcagcagctcagcccttcaggatgacactggtcagtgtgtggctgctatgtggaaaaccaggcagggcaggggctgctcattcacaggggcagcaagaaggttcaggatgcttagaggacttcctcagaaatgtaccagttgctgtgtggctttggacaagtcctttttcctctctgtgcctcagtttcttgctctgtaaaacacagatggctgatctggacaaacaacaattctattcagtttgatgctgctggttctgccactccccttctaccccaggagatgccttggggggctggcatcatctctgccttcttccacagagactctgatgctacagggtggggctctgagaaatgccacttcagagcagggccctgagagtctgttctggtcactgcccacactggctttcctcactcctgcccccaagggttatacgtttccccatttctcctcctgccacctagaactttaaatagcctccagcacactatgtggctgccagaagttgtaattaaataatgtccagctgtcagaaaagctgttataaatggtccttttgtctgcaccactgtctgggaaaccaggaaggagagaaactagggggttataaatatgaagggcagaagttcagtggggagtccggggaaagcagcttttagggaccctgaaaacactggaggaattaaaagaaaaagtgtaattagtctatggcagaggccccagctctggctctgtgactggatttgcacattgggtagcctgaaaataatttgggaagctaatgtctttatctggagctgcaattaacatctccttttaaaatccagacaggaaagcaaaaagggcacaatgagtgctggcaatccagagaaagttctcggatcaactttcattatttttcacctccttttcttccttcctttagtccttccttcctctctttcaacaaacacacttgaatccctgcccttactagcccttctacctctagagttcctgcacttcaccttctacccccacagccacctttgttggtgccatacctgaccctgtctcctaggggcgggccaggatctcagtcctctctccatcaaaatatgcccaacctgggagccacttgcaccttctttttgtgctgcagaatctgtcagtggatctcttggagtgcccagagatttttcactaaatgaggaatagggagaggaaatgcacatttattaaccatgtattaagtattaaataatttacacacattattccacttaaatttcccaacactcctaggagaaaattattatgaagcccagtattgtaaatgaggaaactgaggctctttgagatgaaacaacttttccaagttacacagccagtaattaaaggactggagattagaaaactcagtctctaaactccatgagggcagaggctgtgtctgttttgtgcattgtcttgctagggcactgcatggtgcctggcacatagagaccttgagaaatattcagagaagaaagaaaggaaacagaagaaggagaaaaatggaaaacaactcagctctgtcagatgccaaagccagtgatctttctatcgtggcatatagtctctgtagagtacagacaggcagttatgaattagagagatgtacataatagttgggggaaagtgattgttaaaatgtgtgcaaaaataacatgattagaaagcagaagattggtttcaaggatcattggggaggtggagtgagagtgccgtgggggttcagaggatggagggattgattgcagctacaggaatgggcagacttcatgagggaggcagagtttgagcctcgaaggatgagtaggatttggacacagagagatggtggtcagggaaggttgagaaaacagaagggatggggagaaacataaattatctgtctggaaggggatagaccagtagttaggcatttgagtctccatggtgtccttgcgtggctattagggatgaatctggctgtgaagtcctccatctgggcattctgagacattcactgacagattctacaacacagaaaatgtgtgggtgactcccaggatgtgcatattttgctagggagaggacttagatcctggcctgcccctaggagacccggtcaggcgcagcgccaacaaaaatggctgtaggggtggaaggtgaagcgcagggactctggagagagaggggctagtaagggcaagggctttgacttcacttctgctcctcctgtgttcctcagcattcttcaacctgccactcagccaaccagggcacctgactagtgcccagggacaatgaagggttgttgaggctgttgttgaactatttgtttttgttgttgttgtttttgttgttttgctgtgctggacatgctctgagagcagcaggaacacagatcatggaagaaatagcccaatggtttgggggattattaaataatcatagccagggcactttacctttatggacaggctgcctggcagcatcctcaaaggccagatgggaactcatacgaccattttaagagacgtgaatgctcataatgagaaggtctgcagtagaatgattcaaggttactctataagagccctctgtaccaaaacgcaggagcccagtcatccctttctggggctgaggcaaactcttgaccaccacaaaactttggctgtttcgttggtggggagaccttaaagccagctttagagcaggtgttatagacacttctccacatgagggattccaggacaggatggataccaggcatgagtggggattctgaatgtaatatatttgccatcagggctaggcaggtgtcctgctacctggacaggcagccttgagcacatctctaaattcttctgggccctggttttctattcacaaacattgattcaagaagttccttgtgaggacctgctgtatgccaggtaggctctgggggcaggcagcaaacaaaagtccatgatctctgtcctcatggagcttctagtctagtggaaataagcaagtaatcacacaaatgcacacattattgcagtttgcaataaatgatatgatgggaaaaaacaaggtgctatgggagaaacttttagggaggggaataagggaagacctctttgaggaagcgacttatagctgatacctgaagggtaagttatctgagtcatattcagaggaagagctctttcaaaggccctgtggatgggaaaagatttgtatacttgaggagctgcagttaagcctgcatggccagaaacagtgatcaaggtgcaaaatggagtggcatgaggctggggtggaggacaagagaagggccagtgatgcatcagcccatcgatcagaaggattcgggacttacccccgtgattgttgggagaccatcgctcaattttaaacaggagtgtaatgattggattcacatgctaaaaataaaataaacaataagagatggaaaaacaacaaccaagcttcaaaaatacttgagcctctgtacaggggaaaacaaagatttgaacaagtattttcatgttgcagaatctaccccatgggaataatctgctagcagaacaaagaattatgtatgaaagtatccattatagttaaaaagaccaaaaccattctggctgctgtgtgaagggaataaacactaataagtcttgcctgcttcggaatcaaatgagagaaaactatgaaagggctttgtaagtggtaatatgggtacacgtttgagagggacccaaaatctccccatcctccaactctccatcctcccccaataaaatgctgattatcccaggagtttaaggctttaaatctattaaaggggaaatgtcccagggaggctcactctttgagctaagcaagacaaaggcagagcctcagccccaaagggactagaagcagtgattctcaaccctggctgtacactagagatacctggtatggagctagccttgaaaatggcccccaaagaaccttactcccttgtgtaccagcccttgtgtagtccctcctatactgaatatgactatcctatgtaaccaagaggacattgtggaaatgatggagtgtgactttcaaggctgggccataaaacacaccgtggctctgtctttctgtctctttcttggattatttgctgtggaaaaagccagcagccatgttgtcaggatgctcaatcaaccttgtggaggggtccatgtggcaagtaactgaggtctcctaacaacagccatatgaaagaaccttgtggaaagagatcttccagcctccagctgacatcttacctgcaacctcataggataccctgagcctaaactacctagctacaccattctctagcttcctgatccacagagatggtgagacaacacatacgttttgttttaagtcatttttttggagtaatttgctatatagtattagataaccaatgctcctggggagctttaaaaaatctatgcacaagtcatatccccagaaattctgattcatttggtctggggtgaagtctaggcgttggtatgtttaaaagccctcagatgactctaatgtgcatccaggattgagaaccactgcattagagaatcgagtgagtaagtcaacaaagcagggattaggtatagggtattgcctcaatttccagggctaaaacttggtttacgctgtgagttctactctgggataagtctaaagcctagtgtggatcagagcccagggtcacagtgggctgatagtcagttgtctcagtgtccacagtttctgtggatccctaaatttcccttaggacacagggaaggaaatcaagtggcctcattggagggaagaagagaggtccagagccagtcaggtaaatccactttccacagtccatagctttgacccatgaaccctccctgcagtcctccacctttggaatgcaggtgtgccggatgcccacttctccactgacggacagccctctaccttcctcccacccaccattgttttctgtccagaccacgttcctgtctctgaatgttctctttgtaacttatgagcaatgatgacagctgattctgaaaacctttgtctgtcctcaaatttccatgactaatgagacactgttcccatctctgcacaataactcagggggctcggctgtctctttgtactccctcatgttatcatcctgatgaaacctgcaataaagtaattaaagtgattagaaagggagtcctagcagatgaagatgctgaggagatggtcagatattgtgagctcacccaggtgatctcagccctgtgtgtcagggtaaggtgtctggtctcctggaactctcttgtgaatggatgctagtaccaacttgcatctgtggggtaccaatgatttcagaagcattttagacattttttttttagcacttgtaacatggtaggtgtagaagatacagaatttaataaaaccctcttcttgttctcaaggagcttttggcttagtagagacaaataagagataagataagactatgatgaatactttccttgggggctgagagagcacagaggagaagtaccttgttcagcctaggtagttttttgttttgttttgttttgtctttttttgtttttttgagacagagtctcgctctgtcgcccaggctggagtgcagtggcgtgatctcggctcactgcaagctccatctcctgggttcacgccattctcctgcctcagcctcccgagtagctgggactacaggcgcctgccaccatgcccagctaattgtttgtatttttagtagagacggggtttcactgtgttagccaggatggtctcgatctcctgacctcgtgatctgcccacctcggcctcccaaagtgctgggattagaggtatgagccaccgcccccagcccagcctaggtagttttgaacaaaatgagatctgaggcattttgttgcctgagcaaagacagagaggggcatatgagagaaacagtaggtataatgtacagatataagagcatagggctttccagggaatcataagcaaccccttgtatgtctaaatatgttcctagaaaccatggctaaggggggtggcccagtggcaattggtgaaaagcaacctgcttaagttgaacaccagcctgtgcacaaaagggatccagtgcacaggaatcactaccttcaaaatacatccttcacccaaccaaacaccatatccagatcctactcatttcacagactatagaacccttcccttttgttgtactagcctagtgttttctccagtcccatccccagaaccagggctttgattttcattcttcttggctgcatgacccactgaaaccctggctcctcgctggtcttgtcctcttgtctcctgcttaggccatgttaaaactggcctccattacctttctgactctcacctgggcctcagtgccttctcttatgaactgcatccacaggcagtcttaacaccttcaagggttttatgggaccaggagttggaaggaggagggctgggaaggtagaaacccaaatgctcgatgggactcctggggggaaaatctagaaggggcagaggcatcaagagtagggcaccaaggatgcagaatgaaggaaataaagttgggggaatacagcgttaaaaactggttacataggtaaggggctcctggataccctacttcacgtcactgaccctacgataggagtcataattgtcaatgccttcatctagatgtagggctgggaataataatgtaaatgtcaagtggtcagtgaagcaatgcagggtgctggggccacagcaacctggaaagcccatggtccatctaattgtgaatgcagctactcagttccaacctgcagctgccatgtggaaatgcggtccagtgtaaccagacattgtaacttctcaagataagccaataatctgtattttaatggaaaatagttggcagttcaaataaaaacaaacgattaaaaaactgtacatagattagatgaaggcagtatggtttttgaatttcattctctacataaaaacaaacagagcaactagagaccaaagctcctaaacccatggacatttattaaatgtccatgcacattgggtaatgaggtaaagcacactgggtaatgaggtatccccatggaccctaaatataagcaggtgaggacaaaccactaaagaccacaagccctgcctggtctcagcatctatgtgagaggatgcagaggggggcagcaaggtatctgacagatctgagaaaaagagaatccccaagtagccagcatgtcctcactggaaagcacagggggcaatttgataacattaggtaaaactgggaaggggtctgcccactccattcgtgggtctgtggcaacgtctaaaaggatgaaacagtccagaccctataaatgtttaaaattgaccaaccaggagtaccccatccagagtccacatactgatgagaaactgcaaggtgtggaatcaaagttgagtacaatagggatgatagaatcagaagaaagaggtcaggagtggtggctcacgcctgtaatcccagcactttgagaggtcgaggcgggcagatcacttgagctcaggagtttgagaacagcctggccatgatgaaaccctgtctctactaaaaatacaaaaattacccaggcatggtggcacacacctgtaatcccagctactcaggggggctgaggcacgagaatcacttgaacctgggaggcggaggtcgccgtgagctgagatcgtagcactgtactccagcctgggtgacagagtcatataaaaactgggtagaggaagagagtcaggaaatctcagaagaaaagataccatattttagagtattgcacaaaagcaacaaaagaaggagctctgtgaagttagaaaagctaacctgaaccaggtctccttcacaaatcccaggaaaactatgattgcgttaaaataaacatcataaaaatattgagggcaaaacccacacaaaatcatcataagaacgaagagaataaggtacagacaacttctctatagacagtgaaagtataccagtaagatatgcccacgaaagagtataactataatgcactatattccaaaataactgaaaagacattaagaaaatgatgcaaggacaacacaaatgagaatgtaaaaaatactcaaagacttatggcaaatcacaggcaagaatgagaaacaaaagaaagaagtcacttcagaaatgaagaccaaactagaaggatcacaagagtaaattaatacaattgacccttgaacaacatgaggttgagctgcgtgggtccagtaatacgtagattttcttctgcctctgccacccctgagacagcaagacctcctcttcctcctcctccacagtctactcaacgtgaagacaacaagactgaagacttttataatggccaggtgtggcggctcatgcccataatcctagcactttgggaggcccaggtgggaggattgcttgggctcaggatttcgagaccagccttgggaacataatgagacctcgtctctacaaaaagtacaaaaattggctgggcatggtggcatatacatgtagtcccagctactcgggagactcagtgggaggatccctttgggaggatcgcttgagcccaggaggtcgaagctgctgtgagccatgatccctacactgccttccagcctgggcaaaaaagacttcatgatgattcacctccacttaatgaataggaaatatatttcctcttccttaggacttttttaacaaccttttctctagcttactttattataagagtacagtatataatgcatataacatacaaaccgtattcatcaactgttcatgttgtcagcaagtcttctggctaacagtagactattcctagttaagttttggggagtccattaaaaagtgggcaaaggacatgaacagacacttttcaaaagaagatatacacgtgaccaacaagcatatgaaaaaaagctcaacatctctgaccatcagagaaatgcaaatcaaagccgcaatgagataccatctcacaccagttagaatggctatgataagaagtcaaaaaataactgatgttggcaaggttgcagagacaaaggaacacttacgcaccgttggtgggagtgtaaactagctcaaccattgtggaaaacggtgtggtgattcctcaaagacctaaaaacagaactaccattcaacccagcaatcccattactgagtatatagccaaaagaatagaaatcgttctatcataaagacatgcacatgtatgttcactgaagcactagtaaccatagcaaatacatggaatcaacctaaatgcccatcaatagtagactggataaagaaaatgtgctacatatataccatggaatattatgtagccattaaaaaaatgagatcatgtcctttgcaggaacatggatggagctggaggccatcatccttagcaaactaacacaggaacagaaaaccaaataccacatgttcttacttataagtgggagctaaatgatgagaacacatggacacacagaggtgaacgctagacactgggcctgtcattgagtggaagtttggaggagggagaggatcaggaaaaaataaccagtgggtattaggcttaataccttgatgaccggccaggcacagtggctcacgcctgtaatcccagcactttgggaggccaaggcgggtggatctcttgaggtcaggagttcaagaccagcctggccaacatggtgaaaccccgtctaaaatacaaaaattagtggggcgtggtggtgtgtgcctgtagtcccagctacttgggaggctgagacaggagaatcgcttgaacttggaggcagaggttgcagtgagcgtagatcgtgccagtgcactccagcctgggtgacagagcaggatttttgtttgtttcaaaaaacaaaacaaaacaaaaacaaaaaaacccctaggtgacgaaataatctgtacaaaaaatctccatgacacaagtttacccacataacaaacctgcacatgtactcctgaacataaaagttaaaaaaacaatggcttagggagtcaaaaagtatatgcagatttccactacatgaggtgggggtggggcacagagaaacaataggtaagagaaacagaaggtaaaaaggagaaaatttttaaaaatcaaaaagaagtaagccggacagggtggtaagcactatagtccctgaggcagaaggcttgtcagtatccaagagttcaagaccagcctgggcaacattacgagacctcctctcaaaaaataaataaataaataataaataaataaaataaatagaacaaaaagacaaatggtatttgagagaaaatgaaaatactgaacagtggcatagaatatctattacataataatagaagtccctgaaaaagaaaaccaaagtaaggaaatggagcaaatactagacattataattcaaggctttcctgaaataatgatatagataataacaaatctaaatctgcatatagaaagaacacaaacacagtgtacctgaaaaattgtgcttgagtgaccaacaccaaaatatattctggtaaaattactgcactttaagaagaaaaaattatttaggcatctagccaaaaaaggaaatagcttataaaggaaaggaaaattaggttattaccagactttttgacaacaatgctttatgctagcaggaaacaaagtaatatttttaagatacttaaagaaagaaaatacaatgcaaggattttttatccagaaaaactgacttttatgtacaaaggacataggtaactcatcgatatacaagaactcaagacaatgagcacttcttgagggatttactagagaataagcttcagataagcaaaataaccaaagagccattgatagtaaaggtttggcagtgagcgttaaatgcatagccttatgaaactaagaccaaatgaaggttagaacggagagtaaggtatgcaatggctatctgatttgaaaatgtagatataatacaactacaaaagttcagaggacaatgtggagaatatatgcagatttttttctaattttttccagtagtcatatttgtggtggtagtatttatattgtctttctgagactgttgagtaggtaatgtgagataaaacaaatgattaatcataggatattctaatcttatctcctaagtactcaagaaaccaggacactcattttgaagggacagagatacagacatactaggaaagagatagagtaaaacctggtagttctgaattcaaattagaagtatcagtatgaatacagtgtataaattttctagctctgtttgctgaaaaggcctagaaataatgactgaactactagcagtgaacatccctggtacacagattttggtattgaagtaccatttcccactagagggaatcaggacttcttgagacatggcagatttcaggtctgaggccagaaatgcacaataagtctgggatatcttgtcatagtaaatagcaaagaaatcaccaaaaaccaccataatctaaaggatacaggtaccaactgaaaaagcatccactagccaaagatgagtccatttgagtatcaataagaataacaattaaaatgaattaaaatgcatcacacatattaatatttaaatacatgcattcataattacccaggccctcctacccccactgccgccatacaaatatatgtcagcttggagaatgagggagccagtcattatcttgaaatctggtaaataaaggggacggatcaagcatttattctgcctttcctgtatgaatgataggggaaatgtctctttatagaagcagttctactaataaattaaaaaacaaaccagactgaattaggatccaccatttatatctcctaacaaattattgaatctaggcactgagcatccatggctgctaacagcatgaaaggaaaatgaacattagttgcctcctgatgtaccacttgtggtctggccaaagtggtcaaacctgagtctgatcagacctctagacccagcagcccatttgcgggaaatacagatgacaagggaatgtgctgagctgcaccacaagtcagcaattagcaaaacccgggagaaatcaggtcagatgactcaggttcctcaacagataaattgtgaagaaaaataaagagaaaggaatgatagtgagactgcttttgcaaagatgatgacagtgagaaaaacctagcatggctgactccatcttgcttctaacctcacaatctggctgtcttcactcatgcctgggcataggccaggctatttagtttatagtttaaccttgaagcaaggatgataatagcccctctctaaaactgatcccttccctgtttggacactgaaactgcctttgtaagactaatgaaaggccacaggcttaggattctgaattaggggcctgaattctgctaaaatgtaggtatagtttctataaactcttgctgctcaggagttatgtggccagaggtcacaagatttgtggcttcctcaattgtttctatagataagatcaccattacagaactgaagattggtcatttgagatgtttttcagacttttgcattctggcaactgactgaacccacccagacttgtgactcatggctcaactggtcctgtggcctccacccagagaacgactcagcatatgaggaccgttttccacaccccaatgatttcatccccaaccaatcagcagcacccatttcctagccctctgtccaccaaattatccataaaaacccagcctttgagtctcagggagactgacttgagtgacagtgtcagtcctttcactcagctgctctgcattaattaaaccctttctttaccgcaataccacagtctcagtgacttggttattttctgtacgagggtgatagggaggggagcactaagaacctgctgggtgatcacaatagcaacctataaggaacatgcaatgccttaaaacacattccaacttcttttttttttttttttttttttttttttttgagacggagtctcgctctgtcgcccaggctggagtgcagtggcgcgatctcggctcactgcaagctccgcctcccaggttcatgccattctcctgcctcagcctcccgagtagctgggactacaggcgcccgctaccacgcccggctaattttttgtatttttagtagagacggggtttcaccgtgttagccaggatggtctcgatctcctgacctcgtgatctgcccgcctcggcctcccaaagtgctgggattacaggcgtgagccaccgcgcccggccccaacttcttttgagacaggatctcaggctagaatgcagtggcaagatcatagctcactgcaaccttgaactcttaggctcaagcaatcctcctgcctcagcctcccaaggagctgggaccacaacataccaacatttttaaatgggcaagactaaactatagtcactatgcacacttgagtgataaaactataaagaaaacacaaagaactgtttactataaacatcattatatagttaatgctatttcttttatattaaaatggaaagatttttttaaaacccacatatatatccaggctgaagaaaacatatctgtcaggccaccttgatcaataacacctccaggtttaagggccaggtgtggtggctcatgccggtaatcccagcactctgggaggctgaggtgggcagatcacttgaggtcaggagctcaagaccagcctgacagtgaaacctcgtctctactaaaaatacaaacattagctgggtgtggtggcacacacctgtagtcccagctacttgggaggctgaggcacaagaatcgcgtgaacccaggatgcggaggttgcagtgagccgagatcacaccactgcactccagcctgggtgagaccccatgccaaaaaaacaaaaacaaacccaaaaaacttccagatttaaattctgcatggaggatcaagctttggatatcatatggactcccaccttcctgttccctctggcctctagacatttgaagagattatccaatgactaggttgaagtcatgagagtaaactacaggcttttattaggcaaccaagaaagagctaagtaataaaatataacttgtccctgagtagaggtctccttgtatttgacatttctattttatttctaaccagaagccctctggggtcatacagagtctcagaaaatgtcatgagcaatgtatatttatgatgggggctccatagttttaggcaaattctactttaacgatacccaatatgcaaaatttcagggtaattgtgatattttcaccacaaaaagactcttccctttaaagaagggttcagcttcaagcttcctttaaatagtagcttggaggataaggtaagcatttgtttacagaacagtaattgcttcacaggatggagggaagtgtgagctgttcaatgattgtgcaagcccatgggacaacaaagcttcgttacatagacagtccaaggttgggagggccatgatgtgcataatgaagcaaagagttgaagaacatcaatcacttcacactctccaggaccaacttgcaaattttcttctttataagctggaatcttcacatagtaagacaaagcatgtgctaagaaaatcagttcagaatttctgaatcattttgttgaacacattgagctacccatttgtctcggtgattatttgaattagtcataaaagcagtttttgataccttggggtttcttaacatctgagtttccttcctatgtttcctctgtgatatgaatttttgtgagaagagactattcttcactataaaagctgaacaggacaattactcattttcccaggctcctttgtcgttagagagcaggcacatgaggcacatgacctggcccaaccaatcagaagcactcacttcagcctctggggttctggggtggagaaataatgatggcaggggaacctttttttttttttttttttgagacagggtcttgctctgttacacaggccagtggcacaatcatggctccctgcagcctcaactttctggtgctcaaaaaatcctcccacatcagcctcccaagtagctgggactataggcatttgccacaatgcccagctaatttttgtatttttagtagagaagaggtctcgctatgttgcccaggctggtctcaaaatcctgggctcaggtaatcttgcctccttggcctcccaaagtgctgggattccaggcatgagccatcacacccggccaatggtggggaattcttgcagtgctgtggcactgtgtcagccttgtgtgtgactttcaatttagacacctggctgataccatgatctaagtcaatgtcataataagccactcggagtgaaaggggacaaggcctcaaagaagatagtcttaaactgtcttaacttaaactggtcttaaaaagaaaataagaggaatattttcattttggacggggggaggagtgaaggctgggaagaagaaagaaaagactgtatggagtgaaacagtgtagggggaagggcctgtgagaattccctgagaggacttaagagcatgttaagaatagggatatcataggggttccatgcaaagttgttttaagtgctgtagtgtaaattacccccctctattccctgcttcttcagctccccaagatgtctaaagtgtactccatactcattggtgctttatttgagtggggtttcaggcatgttgaaatcaaggagaggctgagtttcacaaatgtgtcatctgaagtcagacagaggagagagaagaaaaaccagaagcccagagccaaaggagaactgaagacaattgatgaacactggacatttgtaaacatcttcgggaggggattctacagaataataaagatgattcaacatgttacaagaccttggctggcctctgcacccactctggagcaatggaggaagcatcggctccagtctgccaggcaaggacaaggcagagggtgatgaactcctgagatgcgagcgtgcatgcaagtcaaaggtgacctggtaaaggcaatgtggctttatagagcaggacgactgtattcggggaggctttaggcttcttatttttaaacagatattttgaggtataatttacatgccataaacttcaccccttgtaaatgcacagttcaatgatttttgcatagtgcaatcatcataatccagccttagaacatttccgtcccctcaaaatgctctcttgtgcccatttgcggtcaatccacatttccacccccagccttaggcaaacactgaccagctagctgtctctgtaaatttaccttttctagaaatgccatacacatgaaagtcttttggatctggcctcttttccttagcctgacgttttcgaggttggatgtagcatgtaccagtgcttcactctttttattgctggatactgttccattacatgtatacaccatgttttgtttattaaacagctgacaattggattatttccacattttgattattaagcatagtgctgttataaacaattgcatacaagtctttgtagacatatgttttcatttctcttgggtagatacctagaaattgctgggtcacatggtaactgtgtttaaacttccgaggaagtgccaaatttttatgtaaagtggcagtgccacttcacatttccaccagcaaagaaagagggttccaatttcttcatatcctcatcaacacgaagtatatcgttggtctttctgattagaaccattttagtagatgtgtagtgatatctcactgtagtttcaatctgcacttccctaatgactaatgatgtggaatatattttcatatacttattaactattcatgtattttctcgggtgaaatgtgtactcaaatcttttactcatttaaaaaagtaggtcgtttgttttcttgtaatcgagttataagagttcttcacatattctggatacaagtgctttatattactttcaaatatttatattatttgcaatatttttattacttgcaaatatttcttcccagtctgtggcttatgttttcctttctttctttttcttttcttttcttttttttaaaggcagggccttgctctgtcacccagactggaatggagtggtgtgatcacagctcactgtaggcttgacctcctgggcttgagtgatcctcccacttcagcctcccaagtagctgggactacaaccatgtgctaccatgcctggctaatttatttacttatatttttttgtagggatggggtctagctatgttgcctagtttggtcttgaattcctggactcaagtggtcctcccacctcagcctttcctgggattacaggaatgagccactgcactggactcattttcttaatgatgcctcttgaaaaacatttttaaaaggtttatatgaagtccaatttatcagttttttcttttatggactatcttttcagtgttatacctaagaagtctttgcctaatacaatgtcaaaaagattttctcccataaaaatatttcatagttttagttcttacatttaggtctatgttccagtttgaattgatttttgtgtatgctaaaatgtgagggtgtaagtttattgttttgtattgatggggcttcaggacatgctgccccaaaatatgacaccatgaacatttgagaaaacagcagaaggagaaggtcattctcacctccttccttctccttctcccatgaagcaggtcataaggacctcatttcagtggtgccctctctctacctggaagaaaggatgtttgttatctctgaagacacagagaagaatctgaataaatagaccttgcaaagttccccccagtttattattaatcattagattataccccttttgtccaatcatacttctgcacaactgtctacttttcatcaatcttatgcatagaaatttgggtcttcatttctgaagcctcctccgtcaaataaaacttacattaaataaatttgttatgctttttaaaatctgtccttattttgggtgactcaggcgtaaacacagcaatgagtgagaaaatatatttcttttcaacacctacagtatatcgatatccagtggtcccagcattgcttgttgaacaacccatacttcccccccaaattgatttagcacaaatagtatttgtcaaatattaattaaccaaaatgaaaggattaatttgggggctcctggttctgttccattgatctatatgtctattcttgtcattaccgtactttcttgatttctgtggatttatagtatgttttgaaattgcatagtttaagtcctccaactttgttcctctgttacagaatagttttggctatcttatatcctttaaattttcatataaattttacaatcagcttgttaattttctaaagaagcctgatgggaaattctttgggattgagttgaatttatagatctatttggagagaatattcagtcctttaattcatgagcatgaactgtatcttcatttattttgatactctttaatttatctcagcaatgttttatagttttcagtgattggcttttgcatgtcttttgttaaatttattcttaagtattttactctttttgatgacatcataaatggaatcattttcctaattttatttttggattattcattgctagcatatagacatacaatttattttgaaaagatgatcttatatcatgcgcctttgctaaatttgttcactagttatagtagtttctgggtttttttttctttcttggtagattccacaggctttctaaaggatcatgttttctgagaataaagacagtttttttttctctgtgtttcctatctgtgcactgctaatttctttttcttgccttattgcactggttagaacctccggtatgatgttaagtaggattaatggcagttgacattcttgcattttctctgattgtgggggaaacatttaatctttcatcattaacatcaggcaaatggcagggttttcatagatgtctttattccaaccaagaaagttccctactattcttagtttactggaaaaaattttgtcatcagcagtgtttggttttatgaaatgtttttttctgcacttattgtgattgtatggtttttgatatttcttctattaatatggtgtattacatgaattaaccaatcttgtattgctggagcatatgccactgtgtcacagtatataatccttcttatatgttgatgaattcagtttgctaatatttagaaaattttgcatctaagtttgtacaggatattggtctgcaggtttccttgcttgtgatgtctttgtccttgacatcagggtaatactggtcttataataggagttgggaagtatcctcgcctccatttccggagcttatgtaggattgggtattgtttcttctttaaaaatgtgatagaagtcaccagtaaaatcatctgggcctgaactttttttatgtatggtggagggtaagatttttttttttttttttttttttttgagacggagtctcgctctgtcgcccaggctggagtgcagtggcgggatctcggctcactgcaagctccgcctcccgggttaacgccattctcctgcctcagcctcccaagtagctgggactacaggcgcccgccactacgcccggctaatttttttttgtatttttagtagagacggggtttcaccgttttagccgggatggtctcgatctcctgacctcgtgatccgcccgcctcggcctcccaaagtgctgggattacaggcgtgagccaccgcgcccggccggagggtaagatttttaatatgaattcaatttatttacttgttagagagaggcctattcagattttctatttttttttctcgaatcagtttggtaatctgtgttcatttgcttggacttaatctgcagaacctttgactctgtgctgtgcagctgcttatatctctgctcagtttcttaaaatattatttatattttagcctagctttctgggagccactcccattcctacccagcacttgcgctcaaacaagtgctttctgctcccaatcaagccagccccctctggcagtgaagctgttggttttcatgggcagcaaaaatgccctagactccctctgttcttacctgaaattcagaagtttatcataaataaactattctcaatttgttgtttgcctttggccaatttctggagctccaaaatggttgtttttgacagtattgtccagttttatagttgtttcagagaaaggatttatcaacttcttcactcccctacagccgaaagttctctcggtcttttaaaactgctgggtgtgtgacctgtcagctaagcttctccttgttttcaagttgtcattgtgcatttgaaagtcaaagagtaaaagctcttttgaaaaagtcaggactagaaatgatgccagggaatgtgtggttggtgcaatggaggggcgtagagtgggtaaccaagaggtcatagaaatagtgaggagtgagtcaggggtgcagagcagtggaggcaagaatgaaatgcatggtctactagaaaatacaaacacaaatggaaaggctgccttacatctcttaacatcaccaatctaacagccgccatttccatgaatagttcatcccaggctccctcccccggttgggatttccagttgcctggggagtgggcaagtgttagggtagtgtagggataggacaggttaggacaggaatgggactgcactggccgcagggaagggaatgcggtaggagccacgtgcactgggaactggatacagccttcatgtcagcctctggaagagagctactaagcagtgatcacagctcacccctagctgccctctagctcagccctaacttgaccataaataaccataaagacttggtcctaatacttaaaagtcgacggttggcaggttatagcctgcaggtcaaatccagctcatcacttgcttttgtaaataaagttttattgatactcagccacattcatttgtttacatacttctatggatgctttcctgctacatggacagcactgaggagttgtgacagacactgtttgacctataaggtctaaagtatttactaactggccctttgcagaaaacgttttccaacccctgttttaaatgaaaactacagtagccaaacctcctaaagcatgataatgtggatagaccataatacatgcaatcagaagacatgggctgggtgcagtggctcacacctagcactttgggaggccaaggcgtctgatcatttgaggtcaggagttcgagaccagcctggccaacatggcaaaaccctgtctctactaaaaatacaaaaaaaattaactgggcgtggtggcacaagtttgtaattccaaatacttgggaggctaaggcacaataattgcttgaacctgggaggcagatgttgcagtgagctgagatcatgccactgcactccagcctgggtgacagaacgagactctgtctctaaaataaaataaattaaaataaattaaaataaaatcagaagatatgggaacaagactgatctgctacataccagcagtggcactcagtacaagccattggttctctgtgggcacaaggtcactataaaatagggatcaggtggatcccctgagatcggaagttcaagaccagcctgaccaacatggagaaaccccatctctactaaaaatacaaaattagctgggcgtggcggctcatgcctgtaatcccagctactcgagaggctgaggcaggagaatcgcttgaactcaggaggcgcaggttgtggtgagccaagatcacaccattggactccagtctgggcaacaagagcgaaactccatctcaaaaaaaaaaaaaaaaaaatggggatcagatgatctattctgtcatttggagttgtggttcaaacaaaactactgtatgtgaaatcatgttgcaaactatgcagcaacaaacatatactattcctgtttgcagaacacccactttgacttcctaaaccacctatttagaccctctctgcttgtggacaactgtcaccttatgtacaccttttatgtggccaagtctgtgaagtaccatttccatagggacttttttccttgactggaagatggagtaggagaccatgtctaccacaccgctgaaagagatggatgggacgagggaactcttaagaaactgaacttaccccagccccgtggaagtaggcatgttgaccagtagcaaataaatggtgtgagaaagctatttttcttcccaagaacatccctggtggagaaaagcatcatctgaattttgatcttatgaattatttcttttctctttaagaatctgaacatagtaatccctgttacaatagcagggataatttagtggttgacatgaaactaaaatttgggtaagagttataacttagagtctggaatttccagcctctgtggctcatttctatagcaaagatacaagaatcctcaggccattagctaaatttgagagaaggtcactggccggctgaaatcagaatgttcaacgtggattatcaactaccacgctgaaagcatctgtaatcttcctgcaggacttctcagtgcgataggtttcaatctccaggtgcaggggaacagaagcatcatcttctcccacgtggagaagaaaagtagtgacgttctgtttataaaacactctcctacccatcctgttattgactatagaggctataggttcctacaggtaggaaccatgtcttttcatcccagtaccttgcacagacccagaatggactaggtgtgcaataaatgaatgaatcctctggaagggaaatctttgaacctagtcaaaagaacacaaatcagtagacctgtgtcaattcttggcgctgcctcttagtcgtggcatggtcttgaagaattcgctttacctcttagtacctcagttttcactcctgtaagatgaaacaataattatctgcctaagatatcatttggtagattaaatgagataatggatagaaaagtgttttataaactgaacgtcactatttttcacccccatcctgcctggcccttcctgctgcagacgctttgagcctgagaataacagctaaacaaatttatggtgtttgcagttggattagccacagaatgagctgtgatccctgtttattttctgcctgccttcgtgagtttaggtcctggtacatgagtgcccgggatccgggaaatgttgattacatgtagttgtctgcaattgaacggtagtgggggttgaggtgggtggccggacctgatggccagaaagattaaggctaaatgcatctgaagaaaagcagagccagagtctgtctctggtggcaagtgtgtcccaggtgacctgcctagagataccactaatcaggaggagaagccaagggggcctgtcaaagggggtgttcttatgaggataattgtttgttgaagtactgtcagaaacagatatgtcaggagatgggaactaaaacactacaggtatgagtgagtgatcagatcttataatgagaggggctaggccttctctaaggaaggctgagagatgagtgaggcttagcaagggagaggaaagcaatagacccagctgtgaaagtgtaaagcaggatctttcagagtcaggcctagaacactgggtgtgattagctagttctcttttagttgaaaattacagaaactgattctggatagcttcaagagagatacaaaagaggttagggagtcagttactgaaaggataactgatatatcttgtagaatcagaggactgagatacttgccaaggataaactagaatcagagatgaatcagtagggtgactatagcttacaataatctattttacacttcaaaatagctagaagagaataattcaaatgtttctagcataaagaaaagacaactagcctgggcgacagagcaagactcagtctcaaaaaaaaaaaaaaaaaaaagaaaagacaaatatttaaggcaatgaatatcccaagtatactgatttgatcttcactaattatatgaatgttttatattatcacatgtaccctgaaagcatgtacatctttatgcataataaaataaaataaaataaaataaaataaaataaaataaaataaaataaaactagaatcgggagttaggttactgtggagaaaccaggcatttgtcctctctgactcttgcctcctacgtctctttatgtttcctttatttttaatttttactgccaaatgccattttttggctaatcaggctgtggctgggctccattatatttcaattgctcatctggccactgctaccttcattagaatgtgaatacttgacggctgtttagtgggctgaatggagtccccagatatatcaggtcctaatccttggaaccttgaatgttactttatatgggaaagattttgcatatatgaataaattaaggatctcgagataaggaaattatcctggattggccctatgtgtcttagattccatcataagtgtccttataagagagaggcagagggagattacgcactcagaggagaggacaatgtgaggatggaggcagatactggagtgatgtggctacaagccaaggggtgctggcagctgccagaagttggaagaagcaaagaatgtatttttccctatagcccctggagggatatggtcctgtgagtcctgtgacaccttgacttcacccactgaaacaggcttcagacttctggcctccagaactgtgaaatactatatttctgttgtttaagccactaaatttgtggtaattgactatagaggctataggacactaataagagtaggggccatccgttttcatcccagtaccttgcatagatgcagaatggactaggtgtgcgataaatggttattgaatgaatggatcctctgtagggaaaactttgaacctagtcaaaagaacacagatcaggagacttgtgtcaattcttggtgctgcctcttagttatagcatggtcttgaagaatttacctcttaggacctcagttttcactcctgtaaaatgaaataataatatctgcccaagggtaccatttggtggattacatgagatgatgaataggaaactgttttataaacagaatgccactatttttctcctccatcctgcctggccctttctgccacagaccctttgaggttgagaataacagggaaactatcactgtatctatgtctaagccccagtgtagcaagatgaggaagagattgatggcttcctgagcttggtctcatcattatctccccagaaccagctgcttccttcctcccctctagccttagacatttttgccagtcagggattaagacctactctctggcagtcaagatctgcagccttgtgggctgtagctacctgctacctttcctgtatttttccattctctcttctctgtagcttctccatcaagatgtcattatcacctgtttgcttcttgtcctctgggtagcatacttttggcccaggtgcctcaagggacctcattcctgttcagcatacctgttgcaaatacctggacacaaatgttctcaaagcaaacccctctatcaacttcccagggaaatatagtgctccatgtgaattaatgttctaggtaactgaaaaccaccctttagtataaaaaaatcaggattgcttattctaatggaaaatttcctatacataaagcgttatagaccttcttatcctttgactcaggaatttcacacctgggttccaaagctacacaaaggattcacagaataattttcttttttcttttcttttttttttttaattgagacagagtctcactctgtcatccgggctgaagtgcagtggcacaatcttggctcactctaacctctgcttcccaggttcaagtgattctcctgcttcccaagtagatagggttacaggcatgtgccaccacaccaactaatttttgtatttttagtagagatggggtttcactatgttggccaggctggtctcaaactcctgacctcaagtgatcctcctgcctcagcctcccaaactgctgggattacaggcgtgatcccaccacacccggccatcacaaaataacttttattgcagcattactgaataagctcaaacttaaaaatggtagaaacatccaaaacaaaaggctagtttaataaattgtggcaagtaactatgtacctgttttgaagacactggaacttatgtttaggcacgctccgtatacatgcagaaaatacaacattaagtgaggaaccattgttgtaaaatggtagtatgcagacactattattttcttacccagaatgcattttcctcttctttctggttttatttaggtataacctccctcatgggaggtgagcctactttcagtaaagcctgacttgcctgagcctgtcatggttgttctctttccacttttcactgattggtttaggggtggtcatgtaatccagtggtggccgatggctaactgaggggaagtcttattctgggggattctgggatacttttctctgttcctgaaagaggtgcacagaaagatgaaaaaattctggagatggatggtggtgatggttgcacaacaataaacaatatgagtgtacttaatactattgaactgtagagttaaattagttgagatagtaaattttatgtcatatattttgttacaataaaaccttgtaatcaagagggatgcacagaaagagactgcctccatgactttgtcttcctctgtggcaggggtggggagtaattgtgtctagatgtggaaataattatgtactgatataatgtacccctcagtcatcactgtccctgggcaatctcatcagctttcacagtttctgtacatctgtatgcagatgtatatgtatacagggactgccacacagccttctgggcagagctccatgccaacatatccaactgctatcctgacatgttctcttagctgtcttaccatagggatctcaaaattaatatgctccaaatgtatatttttgtattttggaaaactcaaacttgtagaaaatttgtcagaggcgtacatgtacttttttttttttctgagatggagtctcactctgtcgcccaggctggagtgcagtggtgcagtctcagctcactgcaacctctgcctcctgagatcatgggattctcctgcttcagccacccgagtagctgggattacaggcacccaccactacacctggctaatttttgtatttttacaaagttttgtatttttcatgttgcccaggctggtctctaactcctgacctcaaatgatctgcctgtctcggcctcccaaagtgctgggatttacaggcatgagctaccgtacccggctgtacaatgaactcttgaatacctttctcaatgactcaccagttaactttttgccttaacacgccaaaagtttgaccttctatgaccccttcctccctgaaatcctcttttccaggctccccatctcagtagtcagcgctgttacaaacctgttgcttttgccagacaccggaagttgttcttgatgtctccatcttcctcttcccgtgacacaaaaccaactatccagtcctgtgaattatatttcttttttcaaccattgcagttgccttctcactacatcccttatgccctctctttcatccacttttattcagaataactagttataagtttgaaacacacccaatcatatcagtccttgcttaacatcctcagtggcatatcctcaatggtgtattggcttctctccttagtctctttcatcaggacctgacctagtttgttctataccccatagcaccctacgtttttccttgtttgtacttttcataattataaccgctaagtaatttgtgtgcacatttgttgactactattctcccttatatgtctatgatggtagggactttgatggtatttctcattgctgtatcctcagaacctattctcagttagttacatgatatgcacgcagtacacattcaccagataagtaaatacatgaatgaattaatgcatcacctccactgagcagattttaatctgctgtgaaatgaaaacttggaataccaagttagagctgcatgtaaattaaaagcaaaaaagcactgactgccaacctaaggtgagtatctgcctgttagtattcggattgtctaccttctacctgcttagaggtggtggagactaaaggaaggaacctaaacttggctgtcatgcagatcttgatgctggctctggccctggccttggttgctcttggcctctttgaacctcagtttccaaatctgcaagatgggtatggtaatatctatctcaaagggcttttgggaggcttaaatcagatagctttggctttctttccatcacctctttgcctggcagcatagtcaggagtgcttaggcctcatgcctccaccttcccctaaaatttgacctgcttgaaagcaatggaaaagggaagcttattatcacagcctcagtcttgcctttgagtagcagctgagaggtagttgttagtgggtagacagtcactgtttctcatgtgcttcctgggcccacgacatagtctgacgacagaatgggaacaaagtggactttttagtgctttgcataatgatgccatgcacgacctctattctgtgccaatgatggtggagttaggatttagatgctactgtctctaaagattgatgttttctttgtttggaacagagtggggtgtgtgtgtgtgtgtgtgtgtgtgtgtgtgtgtgtgtgatagcctttaaaaagcaaggaagaaacaaaggtttatgtgcagggtgtacttgtcaggggctcagtcttgcagggctggaacccagctgaaacttttgtcaaagccatcaggctctttgttaatgaagctcctccgaatcaaactgctctacatgccagtatttagcacaagaaaggtaaagactcatgaaatgacagggccttagtgtttttccgcacaggcactgagattcctttcgaatgaatgttgttagcaccctttcaaacagcctctccgaaggttgctaacttatgcctatgagttctgccttccttccttgctgaatatcacatggtcttcccttcctcctctgcaattctcacagtatgtgtacatgtttgtggggtctgagattatatttgtgtattagagaaagcctgtgtttttggatgtattggggagctggggtatgggtgcttcccagaccatggctggggacactcctcttcctttctacaaagcaggtgaaaaaaaaaaaaaaaaagaaactgattttacattctgagtctatggtcttacttttccataatcttttatacgttgggaaatattcctctcctacatatttttctaagggagggtgatggactctagagccagaaacctcttacagatgggggaagctttttgaaaagaggcagggaggccatgaagggatgtgaagcggaagatgttctcagaggaaaagagggcagagtgtgtacctgcaagaacaccctcaactcccatgaaggttttacaattttatattttccccttggtttatgaggacaatcatagattatgtatggttttaaaaatcagctttattgaggaataattgttttataattagctgtgtatttttaagggtacgacttaatatgtttgacctatctacatacctgtgggaccagcgccacaatcaaaataatatccatcatctccccaaatttactttgtttctttgctcctttgtaattcatctctctccccatgccatacccagacagccaccgatctgcttcctgtcactgtggattagtttgcattttctagaattttatataaatggcatcatacagtgtatgctttttttggtctgtcttctttcactcgaggtaattattctgaagttcatttatattgctgcatgaatcaataggtcattccttttatttttcctatatggttgtaacatagtttgtttacccattcacctgttggacatttttgttatttactgttgttggctattccaaagaaatctgtgatgtgcatttgcctacaagtgctcatatgctgaagtatacagtcttaagcatttccttttctctcatggtgacatttcttttacttgtccccagcctctgtaaagaccaacacagccatccagtcttacacagtggtgttgtgggaagtaaagagacaggaagaggcagtgtggcctgccccttgttcactgtccactatgttgatctgtgtggtgaccagtagtacagtggacggtggtctatagcagaaccagaaatagcccagagaagcagttacaccaaggactcaactcagaaacagctatgaggcaaagaccctttactcccagacagactttgtggaggcaggctgacatttgagatgcacataaaacatcatgcccattgtaggcacccagtacttccaaattccctttctgctatgtgtactttcttaactgctttgtttgtaagttctaggttatcttcttaacaattgtggtttgtaggcaaataacctttggctaagagaggctttattctgttattctttaaaaatcttagacagcacataaatatagcaattgtctcagtccattcctgctgctataacaacataccttaggctgcataatttatacacaatagaaatgtgttgcccacagttctggaggctgagaattccaagatcaaggcaccagcagatttggtgtctggtgagggatctcagcttccaagatggctctgtgttattgtttcctcacatggtggaaggaacagaggggcaaaagcagggctcaggcactccctgcaacctcttttctaaaagcactaatcccattcactaaggtggtagtgctcatgacttaatcacttccttaaaggtctcaccttctaatactatctaattgggtattgaattccaacatacgaattttggaggaacacatacattcaaacaatagcagcgatatacacagatcctgtgtctgaggtgtcccgaggtatccctctaactcataagccctctttggagaggaggcttttgttgtatacaggtatcctaatgtgtcttacaggatagcactgtgccacctttatttttttctttataattgtgtaatttattattattttgtcatttttccaacttttattttagactcagggagcacatttgcaggtttcttacctggttatattgcatgatgctgaaatttggggtgtgaatgatcccctcacccaggttctgcatagtatccaatagttagtttttcaacccttgcactcctccctttctctccctccagtagtcccgtgtctattgttccagtctttacatccatgagtgcccaacatttagctcccacttataaaggagaacatgcaatatttggcttactgtttctttgttaatttacctgggataataacctccagctgcatccacgttgctgcaaaggacatgattttgctatctttttatggctgcataatattccatggtgaatatgcaacacatttactttatccagttccatcattgatgggcacctagtgtgcacctttttagatatgttatcagcactgcttccaaatagcttctttgatggttgctaacttatgcctgtgagttttcttcatcatcaatttcagaactatcccaaaggctaaagaacagtgaaatacaggtaaatggggtttcatttacatctcaaaagccccagatagccgggaatatctgaaggactgactagatgatgtcctgatgatgtccctacttgcatataattgcttagaactatgcgaatcaaagactttgcacagttccttatcaccgactgacagagcaggagggggctttacaggccgtgttgtccaatggtgtcatttttaagaggagccaggacagctcagagaggtgaggtgccccacccagagtcacagagtttgttagcagctaagctggatgaggaactcagccctccaggcttccggtccagggctctctatcccaactccccccaacccccagctctcatttagtttttctgcgcttaatatgttttccttgaattgatttttctcctctgcctcatccattaccttgaaggttatttttggtgctcttctctgcttctttcattttgcagattgatttcccaggctttgctgagtttggtggcacttcccaccccagggtctttggcttcattattgttctgtttcctaccccctttattgtcttcctggggcttataaaacagaccagcccccaatatctcttagcctatcttccctccccacttcctcccaaatagcccccaggatgctgctatttcccatcatgcactatccccatccccccttcagtctattcccagattgcaaaatctgctcataatgacaaccctcggagctcatccttcagtgataattcaaggctgcaccagctactgggtagtgactactgatacatctttctgatggcatgtcttttctccactgggttttcattgtgtggagatgtgtctatttggaatgattccttctcttttaactatgtggtgggtggggcatctgccaggtgcttagcaggtgatggttgctagagtaaggagcgtttgttgtgtgtggagaaggtaagagctggagtgagcaccattcagggcaccagagttatagttccagcactggagtattgtagaaaaacggagagggctttagatagagtcagacaaacgtcctttcaaagcccagccttagcattgattgactttgtgatataaacaggcctgagttgcctcatctgtaaaatggggatagtacgagtactcaacaactgtcagattgaaaggcagtcctaaatgtggcaaagtgtctaaattgcttagctcagagccagatactttcttctggagtcagaagaggatgggcttcaatcctgggctccctgcatagtagctgtaatcctgcacaagctaattaatttctttaagcttcagttttcttaactgtaatatgagaagaatgaatcatatctaataaattggcttgatgattattacacaggagtatataaagtacttagcacagtgcctggcatgaagtaagaacttaataaatgttagctatttttaggtgttcaataaatgttactttcttttcctttgtaaatttagccttttttgtttttcttttttttttttttacaaaagatgaatgtacatcttgagaatcctatgaactttgagaagtttgagaagttaagcattcatcaaatacttttctaagtattgagtctatttactgagtgtatgatctgtagagagaaatatcaacttctgtggagctcaaaacctaattgggtggcaagcgactaggcaaatgatttcaagacaatttatcaccagagccaaaataataaattgccaattgaacaactgcttcaacaattcaattctatatccacttattaagaacatactaaaggccaggcataaaaatgaacaagacaaagtccctgccctctaggagtttagtctataaaggtagtagtattagtatacactaatgatgctgctgctgctgctgctgatgatgatgatggcaatggtggtggtggtgacgtcaacacctcaacactaatagctaagatgtatagacagcttactacaagacaggtgctggccaagggctttgcatgcattgtcttatttaattcttactggagccttttgagatcagtcatgttattctcttatggatgaagaaaaggaggctcagagagttaagcaatttgctcaatgccacataattcctggcagcagagttagatctcatactcaggtctgattctggtcaaagaccttgcacccagctgctacactgcactacccttccatttccagttacaatggaggaaataatcacataaatgctgtggtagaggaacaaagtgctgtgggggaaggggattctgattctgacaggggtgattgctgaagtcgtcatagctgaggcgtctttggggctaggtcttaaggataagtagtagatcaatggcaggttatggagtggaaggggttccagacggaggaaacagcctgatagatagaaagaagcctcgaatctctaggtgtggttggggaacaagaaactaagaaactaagaggtgtggtaggaggagagaggtcttgccaagagctttagagtcaagagaggtcagagtagattgaggatcattggaggatgaacttgtgagatgcagcacaaaggctagggagcctcatactacttgtttgggtaactcaagtaatttattccaggatctgtagggaaagatttttaaaacttttatgtttggagttttttcacatgtttgactggggagccaggagagttgggttttagtgaaaggccagaaccataatgggctctgaagttggaccgttgggtttgaatcccatctctatcactttctgactgtatgattttggccatagttaacacctctgtgcctcagtttcctcctctgcataatgggttgttgggagctgcaaatagatgaatgtttataaagcagttagaacagtccctagcacaaaacaagcactcataaaatgattattggtcatggttcaagtactggttggccatatgactttctctatctgggcttcagaatcctaatctattaatgaagagattgaataataatttctatgatctcttccagtctaaaatggtccaaatgacttctttggtgaggaagtataagaacataatatctttaattttcttttccttcatttctagtaaaatgaagaactagagtaattcaggggtgccaagctatgctgcacagggtttctgtccgactgaaccttcttggagctgataatattatcaagactgatggtctcattactggaaaacctccacgttgtcaatagatatagacaacggggctcttctggttgaaatactaaaacaaactgtcaattctggtgaccgcattaccttcgtttttttgttttttgtgttttctgttttttttaatgacccagaggccccaccattactcaagagttttgatcatcgtcacatggtttcgtctgtgctaagtctgttgcctgcttggctagccatgggggcagcagtgagtgattcatcacctgctacctgtccacgacggggtcggtctgtgctcttgctgagtatctggcctgtttgtcaggctgtgtggttgccgagtactgtgttcaaggcacatcttgtccctgagaggctgcctcccaggagacgcgtgcaggatcaatgtatctaattcatccaatggatatttacctcattaaacagcaatacattcaaacagaaaaatgaaaccacacacatcattaaagctaaatacgtttcctttctttgtcttagttttattttctgaagggaaatgcaagtagctctgcataacgagaggctcattgctggagcagggcgagaagctgaaagcatcgaggcaaagagagataaaaggatattggctcccagcaatatccctccttgcaggaagtaagcggtggtgaattcatatttctacatattaagctgttctgtcggggtgggaacaccccttcgtcagtgcaggggagaatgttggcagggctggccgtgcctgtggggatgaggtatctgtccctgccagcccaggagcagcagctggccctccagtgtggtctctctaggtggtttccccttgccctttccaggctgagctcagaccacattgtggggcaattgccagaagtgattgtctctagtgaatggagcgcctcttctttagagtgttaaggatattaattaggtggcaccaagttcatttagtccttggtttgtagttaaatctgttatgaccccataatcttcttgggattgtgaaatggttaaaaaaaaaacccagacttttcactctctttcaggattttactcagatttgtgtgtttgacaaactagctagtagtttatgctctatagcagacatttttgcttgcctccaacacatctatttcttcctttatcctgacctcggtgtccagatttgctttggaggaacaatctcctgctaggattagcttcgggtattgaccccactcttaattctagggatgggttagattggcttgagctgattagtatgtcctgtttccaggcatgtgacacaatttgagcaaatgagacacaaggtgccaagaaggggatggggtggatgggctgccattctcacaggcaggagctggtagatggcatacaaggaagctgggaggtgggaattagtgcggccctttatttgtatcctgaggatgagggacatcctgaggatgagcctggcacacaaaggaggccagaatagagagaacaagggctggctctgccatgacaaagtgaacttctggaagaagccgtaagtgaggccagtttctctctgggttgcaaagggaagtttgcataatcctatccaccacagaaatggggaaaactaatggccaaagattatttagtctcatcaacaaaggaatgctttctgtttcaaaatgacagattctgtaggagctaatatttacagagagcatgtgtcaggcatgagcttatatgttatgacttgtttaagccctcagatgacccagtgaggtgcatactgttataaatccattttacaggtgagaaaactgagccacagagagattaagtaattttctaagtcacagaataagttaagtggcagagccaggattcaatctgacatcagatttctcaccatcctgtgcaactgtagtattctacaactctacgatttccagaaacagagccaatgactcttcccactgggaactatcaaccatccagccaatttcattgcccagagcttttcagcttttctcaattccatctcctttgcccagatgataatagtctgttgcagtcacaaatcatctcgcctcctcctccacatctgacactctggtttctgtaatgtgcatctccctagctctatataagaaatgtaaccaacccacttccacctgctcctcagcacctgcttttctacaatagtctcaaatgcaaagttcacccacccaaggaagcactcagtgggattagattttgaaggaatgaacacttaacattcctttacgtttagataaaagttttgaaaccttattcaccctgtgacatactggtcttgcccaggtcctgggggagcgcagagctgtggaatgttttcccattgcccttctctatcctctggtcaattctatcatgcaggcacattcttgggcatattctccaaattctccatgcagggagccctccagatcttcacactcaatctccttacactttgatattccccagggccctgcttcttggtgctgtccaagctctacttgctgtgtgatatggtggaaagatttgagatgggagctgcctggcatgatcaggggcacttagagagcaatgaaaaagggcgcataatgacaagcagtgaacaagtcatcatagcatcaatgttctaagagggtcctgactgatacctaagctttccaaatgctaccactctagaatctcttgttaagtacatgagaagggtgtgtttatgtatctacaggggtaatacccaccccctccacagccattctctaccccttccacatcaagcagtcattggcttatctgtttgaataagcacacacacatgactagatattaaagggtaatttttataaatcaaatcagaaaaccttgaggctgtaccaggtatgccccagttccattcactttgcaactgaaccatctattgatccatccgcctagccattcatctaacaaaactttattgagtacctacatgtgccactgtgtcaggcactggggatacaaagatgaaaaaacacgtatttgcttcccctggagcttgtactttagtggaagagagaccgcgtatttcatgatattcaggtaagcattttgacagagttaatcacagggtgtcacagaagcagagaagaggggccaggctttgggaaccagaaaagccttcctagcaaaggtgacaattgggattaactgctgtgaatcactgtggcagatactaattactccctggtacctgtcctctttcttccttctggtaatagaacctacaaggttttagctgggcccagtgaccaaagatccattttccagcctcttttacatctagatgtagccatgggactaaattctagtcaaaacaggatatgagtggaagagatgtttgattatatttttcacaaaggtattttgttctctgcttccttgttcctatgtggataaggtggaggtgatctgactctgactatgtggataataccctaggggatgaaagagacgtaagatacaaggaaatggggccccaggatgactctgtggagcagaggcacctaccagccctagaccttccacccatgtctcactgcagctgccgtatgtgggtgccactttgtaacagcagcttaacctgtacctttacaaaatagctgaccaccttcaggctcatatttgctgagaaatacaatcagataagatattacagtgtcccctcccttttggtaagtatgatctataagtagttggtggtcaccctactttgatattcagaaggatctggaggtaaatgaaacattgaattctggtgagaactttgagccccagtgaatgcccatatgatatgtagttagtgtttccctgctaggccttctattaggtttctactttgcggctagatgtttggagacagagtcatttatagtgatgagagaggtgatggagctttgttctcagcctatgatttgggccacctgtccctcccacttacttcctgcggatctcttccccttgggcttgccactgcccttggtaaagctatatatcatcttctccaattcaaagatacattcctgttcttatttctgagattttctaagacgcagtactcttgaagttgtatcccactcactccttttgaattatagtctcagattgtggatcctttctaatggcatcttcatttggtacatatttttagagcctgccattggtcccagtattaccctcagtcctcctgttcaacttaaaccaatggagtaggttagtttgacccagtatctgtctttctgcattggttctcactcagtgctctgttggcatcatccccagaggaagtttctggcgtgctttatagttggagctatataactgtcttaatgcatcatgatgattctccttctccttcttcttcctctttgtcacatgaccaagatcacatctaaaaactactctttggactaaatattagagaatgaagactgccaaggacttcactaccctccaatatttccaatgtctgtcagtcagtgaattagaaggcagttggctgtgtctcccccagaatatatctacaggcaatggggcaggtaaggtagcatctccaggggattccctactccatgcaatctgcctgcgtgagccccagcccttatggaccaaaaaggaaacaactgcgggagtcatgggaaatcatctgtggaactagatagactctcagactcctgccctcctatgattagtgtccctaagtcctggatggcctggggctcccagcccagtcgatctctctctcctctgcccccagctgcagtgcatgcctctgtgataccactgctcatactgtactgttttatttgagaatgtgtctctccctccttcaaagtgaattatgtatcttcatgtctccagaaactagtacagcacctggcacataggaggggcttgggaagggtttgtaacatgaatgaatcctcagaaagctcagctgacacattggttgcatacccttatgagtggcatctgaacacctaatcacaaaacaatccagttttgaaattctggatgcatgtggcattccattattcatcttcacatatcacaccacagcatgtgtggtccactgccctgttgcctgtcattgctcattttcccagtcctaagagtctgagacctgcctttcctctttgtatcctttgtttgccaacaggtctttagctagctcttgaccctgcctgctcagtggcttctggtttcttagctgaggtgctccctatttctggctggattctatgaagcctctcactagtcccaggctcccttggttggagggagtgtgcagggatttggataatatagtgtgtgaaccaaattggaaagctggttgactggcatttgaggaagacatcagaataagaaatttcaattaaaagacactcctccttaattccagacttctacatcattctacacatgcctctttttctctttctttctttctttcttttctctctttctttctttctttctttctttctttctttctttctttctttctttctttctttctctttctttctttctttctttcttttctctctttctctctttatctctttctttctctctttcttcctttcttttttctttcctttttcttttctttttatttcttcctttcttccttctctctctctccctctctctctctctctctatatatatatatatatgtatatatatgtatataacattatcaaataagtgcctggaaattaaccctcctactgagctcattacctggatacctggaactttatactgaatgctcagacagccccataagcatttggacaaatctcaccatagcatctctaggcccccctgagtcataggagtccttgactcaggacttttcacagtttacaagtaccaacaaggcacttttttttctgcttaggaagaacattttccctttaaatgttttgtttgccttcaagtccatttgaatacaaaaatactatggaattccattaagataatgtctggggcataagacaccaggataaaaggcaggaaattgctctattctttatgcagagctccaggaggagctgacagttcctggataacttcaggaagcagactgttaagaaaatgagtgggccatatttcatgctggcttctagcttcccctggctgtttttgttaggagcttaagggattgttagagcaataatacaccaggctggtttctaatgctttcctccaaatgctgaagtttcctaattgttcaacaggaaaattgttccttgggctgaaaatacattcttaagtcccttcaggtaagttagtgaaatgagtagaagatctttgagtgtgggccttttttttctttttcttttttttttttttttttgagatggagtctcactctgtctcccaggctggagtacagtggcatgatcttggctcactacaacctccgcctgccgggttcaagccgattctcctgcctcagcctccctagtagctgggattacaggcgcatgccaccacacccaggtgaattttgtatttttagtagatacagagtttcaccatgttggccaggctggtcttgaactcctgacctcgggtgatccacccaccttggcctcccaaagtgttgggattacagacatgagccaccacgcctggcctgagtgtgggctttgatgataggtaacttattcagaacaggaaaggtctgccccttttccttgaagaatgaatgatttggaatctggagaggggaagagattaatgcctagccacacagggagattcctgatttttggtcctccagctttctcccatcttttgtgcccaacttatgtggagatgtgtagaaaagttctctaccagagtatttttcttggtagctgttggattcaagtcttaaaaactgtaaggaccagcttgagaaagtttcctcaggataaagccagagagagtgtagtcagacttagaaaagaacttcttgatatcagggcactgggattctgggatgggagatttaagtaggatatggattatttgcactaactggattgtatttttaaaagaatgcttaaaaatattttttaaaattaaaatctccttaagctgataagcaacttcagcaaagtctcaggatacaaaatcagtgtgcaaaaatcacaagcattcttatacaccaataacagacaaacagagagccaaatcatgagtgaactcccattcgcaattgctacaaaggaaataaaatacctaggaatccaacttaacaaggtatgtgaaggacctcttcaaggagaactacaaaccactgctcaacgaaataaaaaaggacacaaacaaatggaagaacattccatgctcatggattggaagaatcaatgtagtgaaaatggccatactgcccaaggtaatttatagattcgatgccatccccgtcaagccaccaatgactttctccacagaattgggaaaaaaaaacctactttcaagttcatatggaaccaaaaaagagcccacactgccaagacaatcttatggaaaaagaacaaagctggaggcatcacactacctgacttgaaactatactacaaggctacagtaaccaaaacagcatggtactggtaccaaaacagagatatagaccaatggaacaaaacagaggcctcagaaataacgccacacatctacaatgatctgatctttgacaaacctgacaagaataagaaatggggaaaggattccccatttaataaatggttctgagaaaaggctagccatgtgtagaaagctgaaactggatcccttccttacaccttatacaaaaattaattcatgatggattaaagacataaatgttagacctaaaaccataaaaaccctagaagaaaacctaggcaataccattcaagacataggcatgggcaaggacttcatgactaaaacacaaaaagcaatggcaacaaaatccaaaatagacaaatgggatctgattaaactaaagtgcttctgcacggcaaaagaaactaccatcagagtgaacaggcaacctacagaatgggagaaaatttttgcaatctacctatctgacaaagggtagattgtatttttagtagatacagggttttgccatgttgaccaggctggtctcaaactcctgagctcaagcgatttgcctgcctctgcctcccaaagtgttgggattacaggcataagccactgtgcctggccttgaaaatatttttttttaagtttaaaaatatgggtgaattcagagacaattatcaaagtgaagaaatatgaagtttattttctcaaaggctttaaaagctgagaaaattatgagctgtcttggggtaggttatgtaaaccaaaaataaaattctaagtcccccaaccatctgaatggatccctcctcttggaaaagggcattccaaagttaacctgaaaaactagttcaggctatgatgggaaggaggaggtaggagaggcctcattataccctcctcccttttagaattattgctagaacagactctttatgtctgataggaaacatttataatctattctctctgaagcccttgctacctgggggcttcacctgcatgataaaaccttggtctccacaaccccttatcttaacccagatatttctttctcttgattctaagtctttagagaataacttaattatctcaatcaattgccaatcagaaatctctgaatctacctatgacctggaagcagatcccccaccttccaactgtcccacatttccagacaaaaccaatgcacatcttacatatattgactgatgtctaaaatgtaaaagaccaagttgcggcctgaccaccttggacacatgttctcaggatcccctgagggctgtgcattggccatggtcactcatatttggctcagaataaatctcttcaaatattttacagcatttgacccttttcattgacagttatatgccctcagtggtggggagactgggccagagagctggacagatctcatccaggactaagatgctcagaccagcaggcttctagacatatcagatggctcttccttggttctcaagactgaagactcaaagatatgaatgacagagacactactggagagaagcagaggaactcataaatagctgtaccctctattccactccccagccacgatggattccaagtttccagaatattattggccaaatgagtaaataaatcagccatcaaagcacaatggaaatgggagatgatggcggtggttgaggaggcaaagaccatctccatgttctcccctctgtattctagatggaagaagatattaataagcagtgtatccagggatgaagattctgaaaaggattaatcttccagattaaataaaaattagctcctttaagcataaaaacattttgttttggttcctttgatttgaaaacattttaaccgtattatatacttctaaaacacaatttaataaaagaaaaattatatttctctctgcttcagaacaataatatagtaatttcatgatactttttttccaggatgctttataattatgatgtaactcttcacatattatctcatttaatcctcaccacaactttataatataaattatatatatttgtatatatgtatacccccaccccaccccccacacacatacatacttctcacttaaacaggtgaagaaaaactgagggttaaaaaaataagaagcaatgttctttaagggcacacagctggtaaaagtcaaagtcaggtgtcaaattcaagttttttgattgcaaattcattgctgagcttgcagagtgaagggctcttgactttctctcagggtacggctaatggcaggatcaggaatctgctaaaaacatggacactgcggactggacaatggggaatgctgggcatatgcaacaagttagtgaataagggaaggaggtcagggtagtttacggaaagagcctggcggaggcctgggccccagagaagggaggcagccaagagttgtttgcaatacctaagtgggtatgcaaagttggcaggatgctttctggcattgccaacccagaagggcctaagcagtgggtaagacatggtggaaggaagcgcttggcaaagacaggtactatggagtgccttagaaccaggccacagctagagacagggctgcagtgcaaggagcagcgtcgagacccatggagcacagactggggtggacaaagcccagtgtgtgggcttaggctaggcgggctgtgcttcagggcagggagccaggccaacccaagggcagagaccatgaggaatggggcagtaggcaggggtcctgacctggcctgtgcagctgggcctaaggccctgcaggttccacagcacacaagcacctggacacagaccaccatgggattcttgttaggcccaccctctagcttccagttactcctaaagctgcaggaagaggaacacggaggtacaggcaggaactccagcagacaccgtgaccatcatgagtaatccttgcatggaccctctggagccagcagagaatcaaaagacacaatggcaaagagtctcagctgtggactcgactctcactcattagctgtgtccctgaacagaggaacaagagctcctggaatgacattgtcataataatggcacccatacttcccttcagggttagctgagggagctgatgtgataccatattaaaaagtatacagggaagcccatacttcactcttgaagaggaaatatggtcaattccctgatatctacttaacctcggggatagagagtgaagaatttggattttgcaataatttcaatatagcagctaaggtattgtggacctacaatgtgccaggcattatggtaggtgttataggaaaacaagatgagtaacagcttggactttgggggtcagcgggggcagctaacatctagttagggggacaaatgcacaaccagtaataatgcataatacaaagcagaatggaatgtgcactgaaatggggaacatgcatggagcagctgcagagactcagagctgggaatgactcatgtggactagtgaggtcaggaagggattcacagaccagctggtgtctgaactaggccatgtaggagagttgtaattgagggtaatagcagactccagccaggacaccataaactgtgggcgtgggtcttaaaccaatggacaagtctctaaactaatgcttggaaacttaatctgcacttctaaagcaccaaggaaacatgtaatttgcctgtgaccagatcccttttagaccctctgtttcaggagccctgggcatgggacctgcatgcttgcatagtgataaagcccccaggtgagtctgatgagcgtttttggttaagagccaaatatactaaaccatttcctcgctttagcaggcttaaaaaatctcctggagatcttgttaaaatacagattcctggacttttccctcaaacattctgattcaggggtctggagtgaggcctgagattctgcatttctaattccttctcaggtgatgctgatgctatgagtctgtggatcactgtgatcactaaagccatcacctgctcttcagttcttgctgggatagtgggactcagagctaagaggtgcccttgattggaaatgcttttgaaaacaaatgcatgcttctctatcttggacctttcagaaatcacacacacccaatcaccttgaaactacctgcccatacaggtgaaataaggacatgccagaggagttcacagcattcacctgtagtctctgtacttgcttccacctgactctacttcccctgtgggccctgcttctcagttatgtttctgtttctacatcaaatctgtataactctcctgaatcttgcacatcatttcccctgcctaggggttttcaggaatgtattctggatctttttatcttctgcctctgagtctaacccctgacaaatccacctgtgctcagcaaagatacggtttggtcacaccaggccaggtagctcagagaacaatggaggtctgagcatgttctgtgtaattctctccaatactcactgtggatagattcagacaatggctttggctcacgtttgtcctttacgtgtttttggtcagctttatttttgaaaaaaaatattgctcacaggagcaatttgtgatcgttagtgtgagagaactcttctaagacctttttgtgttaggagaaattacctagttgggattgttgagctcactgactggccatgggacttggtcatttgaatgggttagctgtcgactgatgacacctgctctttagaaactcagcaacataggccttatattgtgggatttcattaattatttcttttcttctttttttgagtcaaatcatttgtgttagaaatagtaagaggtgagatgctagaaatgaagagataaattggatttgatcgcctgtacttgatttgctcacagttattggcagaggagacacacatactgtaaatagctataccacaatactatgttgttagtattgtacaatgacagtgcagaggggggagtaatcatttttggctactggaaagaaggaatctttatggaaggagatactgccttttctccgcaggaatggccagacttttgagagaataacaatatctaagcataacacaagaaatatgtgttaattaagaggaggcaaatgtgtcacatttcttatttaaccacaatgaagattttgataatattaatagtattaataacaaatatctattgaatagtttctgtatgccaaccactgtgttaaaccatttatatgcattatctaatttaatgaaacactctcaacaggtgtatgaagtgatagtatttcctcatttgacaaatgaggaaactgaggcttagaaagattaagcaactcactcaaggtcttacagagctgaaatttgaacccaggaatttacaccagggacttttcttttttttttttttttgatacggagttttgctcttgtcatccaggctggagtgcaatggcgtgatcttggctcactgcaacctccacctcctgggttcaagcgattctcccacctcagcctcccaagtagctgggattacaggtgctcaccaccatgcccagctaatttctttatttttagtagagatggggtttcatcatgttggccagtctggtctcgaactcctgaccccaggtgatccacccaccttggccttccaaagtgctgggattacaggtgtgagccactgtccctgaccacaccagggactttttaacagggattgcttgctaaacacccaccatgcactgggcacattgtgtaagttaccattttaatctttaaaacaaccctagaaagtaggtattatggcaccatcttacaggggaggatgcacatgctgagaggtgagttttgcaattttatacagtcattatacagctaggagcagaaaccaggtctgtctgagctctaaaactcatcttcctttgaccttgccagattcttgcctcttaatgagatcctttgatctcttcacccaaagtggagatgataaccatgggtgatccagacaggctgcctggggagagcctgcagaacatcttggcaatggaatgattactccacgttggcttctggctggatggaggtgcttgcctagagaaggaaggaaacaagaaaacatggggcacacaggggccaggaaggaggtgagatgttgaagccactctggtaactgacaagggatgagtttggtggggtggtggggttttggctgggggtttggagtccaggaattctgggccctaatcttgacttctaatcctggcctcaaaactgtggtaatcttggcctatttgttgtacttcccaagcaaatagctcagcaaatgagctcagttttctcagctgtaaaatgggaatactaatagtttcctggtatggttgccacgatgaataaatgagtcagccgggagcacagagtctggccataggcatgcaataatcaataagtaccatcttgctgcctgtttactttggctcctgctggctttgatcaggctgtaaagaaaaagaggctaatttcttgagcaggaaggatctgattctagccaaggaggccctggggcagggactggcatgggggactatggcataatatccatctgttcggttccttctccaggcgagaatgctggtttctgcagccttcatccaagcactaaatccacctaattggtttgaaaagcactgggtggataaacatcccatcggcttaccactgtaataatgccagtgacatttattcctgagatgaaggatgcagaatgaatggagatcagaccccaggtactctgctataaatgacagcctagacaaggcaccccctgagccaagaaatgccagcctttggaggcggggacttggggatgcatcaagcaggaatgagtaccacgcggggcttctggacacttaaggaagagcttgcaggctgagttaggaagtagatcagatttgcccatgacctggagaggtggaatgaacacgagaacattgtgctgggcaagttactgaatctctctgaaactctggttcctgtctatgggttgagtacctcatgatgttctggacatgaatgagaaataaatgaggaacctagccctgttcctgccaagctccaggtgttccagtattgtgaggttttctttttatcctttcacattttttctttctccagatcttctttctcctgaaaccacctttttctttgctccaaagatcccaagacctgtccaccccccatcacgtacccatgagggcacccccttcacccattcattcattaataccattttaaaattcattcgtcaattatgttttggtcaggcaaaatgtgccagatttctagccaggtacctggtatacaaagataaatcagacctctactctgtccttgagctgttcagaggttaatggaggacaggactttgagtcagacagagtcctaacaagaaacagatggcatgctggatgtggtggcttacgcctgtaatcccagcactttgggaggctgaggcaagcgaatcatctgaggtcaggagttcaagaccagcctggactacatggtgaaaccccatctctactaaaaatacaaaaattagccgggtgtggtggcacacacctgtagtctcagctactcgggaggctgagacaggagaatcccttgaacctgggaggtggaggttgcagtgagctgagattgcaccactgcactccagcctgggtcacagagcacgactccttgcatccccccgccaaagaaaaaaagaaaagaaacagatggcatactaagagtaaggtaatttaagcaaggcctctttacaaagggactagtgagaaaggaatgggtgtaaccagcagcagcatggctgtcaccacctctaagtccagggattcaagggggaacggaagagaactgatcttggaacctagcaacagaggggcgtgcacagcaggccaccttgagaggggcaggcgcacaaccagcccaaggtaacttcccaaggagggagcctgactttgccctttcttccctctgacatttttgggtgctccctgttgtctggcctgaccagaagctcaagggcaagggagcctgttgatttagtccacaaaggccagcctcctatggcagagggcaaggtgacagagggtggagagtgggtttggagggacaaatgcagtatgtacagtgtgtggggtataactaaatatggttgcgtgtgaccttagaatggttagaggtaggactagggagccctagccggaagtgagcaattcccaccagtcctttctatctcacctgattgcgctgcactctccaattcaaagggctggagttgatcgtcctgcctccaggctgtccacctccaatcctctccaggatggttttttgttactctcctacctccaccaatgctaggaagtgcacattttcctaaatactcaacaccctcttcttggcctttgaactgctatctttcatctccactccccaacccagcctgagacactctttcccctcctcatttcctggaactctctgctgcccttcgaaaagtcataacctacctaaacattcagaaacttacagagagtaaaaattagacacccacatccccaccccccagtatttaacaaatgttgaaattttaccatatttgtttcaggtctttttttaaaaaaaaagaaataaaatattgcagatacaatggaatcgtatgttgtacttctactcctccttgtaacactattttgaagttagtgagtgttcacctatctgtgttttttacacttttcctagatatcactgctttaaaatttctttaaaataattaccattacattataaatatccttttaaaatcttgctttttgcactcaacgttatgtgaatgttttgttgttttggctttgttggttggacatagtcttaggactttttattgacttccttctaatgatgggggttaagtaacgatgtctggttcactcttgatttaagaagagtggctttcactgaaatttcataagaacccaaaattgcagtaattgccaagtcttttgcagctcctcactttttcagtgtaacagcgtggctgctcgcatccctgtaatcttgctatgagggaaagcaagcggccttatctgaaacagaagcaaaggtggctgctgcagccctcccccatccccatcccctggaggtctcctcctcccttcctggggtgaatgcttgccatctgatgatctccagccgctgcccataaacactggcaattctcttgcaattttgatccattctccacgtctagcatcattataattatcaaaatttccagacttacaccgacatcatgagaggaaaagtgaaaggctgggaggttattatttggtagccctgttcactaagtaaggaaaagcatgaaactgtcaccagacatcactgaattctggagcagctttgactttagacttcatagtccacacgcttaagtatgtggcacagaacactgtgccagttccatagaaaccattctagcaaggacctaaccggaggacctatggtatatcatgccaggagggtttctcctattctcagtcccagagaccttaggaatacgtgaccaccatcactgcgacctccaccatcccatttataatcaacattacgcttttgagccacaactatggtgacatgtctagctctatttcagtaattatggttactaaatcttattccactgtatgactgtatcacaacttatttatccacttccttatcgatggacatttaaacttttcattctttgctattattagcaatgctgccatttaaaaaaatccttcaactcatatagaaaaccttttgcaaagtgtgtgtgtgcatatatatatatatatatatatatatatatatgtacaggggtgtgtgtgtgtgtgtgtgtgtgtgtgtgtgtcagttcttggactgagcaccaatggaagagagctaccctcaagggaggtggatgacagaacttccaagagggggtgcagctgagagctggccaaatggtgagagtgcttgctaccctcagggacaaatcgttcatgtgtccctgtgggaggcccagatgaaaagagtaggctctggcagaccaatctaattttctcccgaaggactgtgcacagaaactgtgcaaataagagatgcgacctctcatgccacccagaagcctttccagtcagtctcgtgtggcatgcccgttcatgagtgaaggcagaaatggtttgcatataggacttttcagcctcagcagttggggagacctctacgttatttttggagaccaaaaacagtagtccaagaacaagcctatactactatataatctcagtgtgtgtatactatgtatatgtgtgtgtatatatactatgtatactatacatctatctgtctatctggctctatttcattaattttggttgctaaatcttattccattgtatagctttatcacaacttatttatccacctccttattgaaggacatttaaacttaaacatatatatactcagaattgctgggtcacatgctgttggctatctatccatgcaaaatatcaccaaatttctcccccaaattgatgtctatttacactcctgccagtaacatctaaaaatccctattagaacttcattttttaaaatttctagacttcaaatttcaggacaatataaatacattgggaagctacatggtgtggtagaaatagccctgaatcagtgaggtgagattctagctctggctctgtccctgcctggctatggggcttgaactaacatgacttcctctctgggcctcactgtcttcatagtataaatgaaggcatagcattaagatgtctcttaagtttcttcctgccttcaccttctgtagtctgtgctttaaatagtggctgacttaagagggcaaggggaattcattcatttatgcatgtgcttcttctttcactagatccttaccatgtccctactgcctcctagacactgagtgtccacatgaacatgaccacgtccctgccctcaagcacctcactcttgaatagggaagacagccattcacatggagaagctcaggccatggtgtcccacactagggatggtcagggtaggcttcctgctggaagctgtgcattgtcttaaggatgagttatagtcagccaagcaaagtataaggaaagtcatttcaggcagagaaagacatagaggctggaggcagctcagggcatttgaggatgtgccaagtaatccagactgattattctacagggttgtggttggaaaagtagcctgggatgaagcaggagtagctagtcagaggccaaactgcaggtaactttgtgatttaaaaaaatgatcttgatgcttttcctgatgccaccaagaatcttttgccaaatgcctactgacccaaggggaacaaggtagcttattaggtaggtgagggctcagagtcaggcatggcagcctagctgggcaatatcccaatgacagcaccaatggcggagagctaccttcaagggaggtggatgacagagcttccaagagggggcacagctgacaactggccaaactgtgagagctcttgctccccttaggggtaaactgttcatgtgtccctttgggcgcccaggggctagggggcttaaggggcatctggggaatccaagtttaacttccctttatttttcacttcaatgtaacatcaaacacgaactaccgttcttggtctccgtaaatagcacagaggtctccccaactgctaaggctgaaaagtcctatgtgcaaaccatttctgcctttgctcatgaatgaacatgctatctgagactgactggaaaggcttctaggtggcctgagaggtcgcttctcttatttgcacagtttctgtcaatccttcgggagaaaattagattggtctgccagggccagctgttttcaaagccagggtggctctagaatgattccatgggagccgttttactggagaccagagagtctcagcatgtgagagctggaagagtccctgggtcccctagttctaccattttattttctgatggggaaactgaggcccagctaggagaattgatttgcccaaggttctgcaatcaggtgataggattgtggagagagatcaggattaaaatctttgtttttactctgtgttcctagatgcttctgctaaacagaattcttttgaaagttattctcgaaccactaatgaaaatggacttcattagaagaaaactttcatgttcaggttgcatgtcaagataatactgttaggaagtacatggatgggttgctgttcaccatgacttccaggagttttattttattttattttattttgagacggagtcttgctctgttgctaggctggagtgcagtggtgtgatctcggctcactgcagcctctgcctcccgggttcaagcgattctcctgcctcagcctcctgggtagctggaactacaggtgcgcaccaccacgcccagctaatttttgtgtttttaatagagatggggtttctacatattggtcaggctggtctcaaactctcaatctcaggtgatccgcccacctcagcctcccaaagtgctgggattacacgcatgagccaccacgtccggcccctaggagcttttaaaaccatgtgttgagctgtttctatatttgttgagggaaagagatttttttttaagagcctaaatgataagatttggtgatgttttggtgaatgttctgggtttcttgtggccatgtgtggccccagtctctggagatgtttgccagaccttgtttggactcagttagttagaaagaaattgtttgtcttgcacacaacagtgttcagctaagtttctttgctgtgtttgcaggagctggaggaattgcagggaacactggatgggggtgtttcttcaccagtgggccttctggggtgcttcccagggccaaataccttccacattcacaaaagccatgcagtcaaagccctgggcataacccgtgctggggcttgcttgcccagctggatggtgtaggcctggctaggaccatgattgattaggctgtgaccaggccttcgcaaggagacaagggaccctctcctaagctttcatctgagcaaggccctgtgcccccctccccaatccaccctttccctgtgggcctcctttccaatctttaaaactgtgtgctcccggaaccctggttcatggtaaacatcccctccatatcttcaacctcctcctcccctttgcttccttgtgctaaataataggggtgatcccctgaggcccctccttcccatggtgaacgctttgccttcataccccagaaatctccgggttctaaagcatgctcctcactcccagagccattcccagaccataaatccacccatgtctaaaacaaatctcaatcttttgaggcatatgccatcttcccattccattttaaaattcattcaacaagtttgtactgggcatcattgtgtgccaggcactttgcaaggagctggggatataaggacaaaagtgtcatggttcctgcccacgtggggtttcctttctcatgggggagacagacactaaatagacaaagaaataaacataaagaaaaagaacagggtgctgtgagcaatagtaacatgaggaacagatttggaggggtggggctcagtcttctccaaggaggtaacaattccagttgagacttgaaggacaggaaggagccacacaagagaagagactggggtggagtctgcagggaagcaaactgcatggcagtctggagaaaggagccttcataaacgaggaattggaaaaagtccatgaggtggtggagcagagaaatagggaagccagaaagcaagaaataggctggagagggaggctgggtacctgtcatatctccaagaccaggagaggagctgggcttttcctgagtgcaaggggaaggggggaccattgaccatctccttactttctataaagacctgctcgccaggtggtatggagagtttaggcatctgattcattctggctccttatccccaccccagccatcctcccgaaggactgtagaaaccctctaccccaaagacttccctcttctctgcttcagccacccactctcaaggccacaccttggacctgaccatcaccaggagaggctccacctgcagcatccaacacccatgcctccttctcttccactgcaaccatacttcctttccctcctggtccctcacttagttctccaggtttgctctttgacctcattaagatgctcagttcttgacctctcaactgtcttctgtcacccagtttttaattcctcccctctctgtcttggacaccactagtcatcatcagccaccaacctttccttgttcttgtcttcatctctcttgtgcctgtcctgcaaagtgcccatcttgcacaattcattgaacacctttcaccttttctggtgcctgagttgctgagggtaaatgctgcaggtgtgtccctttgtgaattcatgatttccaatgcctcctaagcctgaaatgctgcctgtttgaggttaccctggccatctctttttctcacgcgtgcttactcttcatagtggttatttcaaatcttcacaactctcttctaaacttctctcttcctgtcctcccacctgactctcaacagatgagttagcagatcatcagacagaaactcccttaactgcctggcacaacacctacaaattaacctgtgtttgtgctctttttcacctttgtctttgttgacctgtgctctgcatcccaatgtttcctccctctgtggggaggttgctccattgatcatccattcacaagaaagagtccacaaatctttgtccttgctgtgtccccagtgcctaaaacagtactgagcacacatgagatgtttgagaaatagtcgttgaataatttctcccttccttcaacctctacacctctattgattcattacacttgcatttaaacctgctcaaggtttttttaaaccatttaaaacaaaaacaaaacaaaaccacagtgaaaacctcttgacctggtgcaccttttccttgggctagagttctgtgccttatctcccctatccacatggccttgaacgagctgcctcagccttgtcgccgctccattacctcccatccatgcctccatcccctgccacttggcttcaccctcccatggaaattgcccttcccttcataacctcatttttgccaagtacagtgcatacattttatgccgatagcacctgtcctcttagcaatgactgacctgctgccctctcctttctttagaaaacactcttctcctgatatccatgaccacattccctcagctctctgctgctctggtctctcctctcatgtggtttcctcctccagtcctctctttgctccagtcagccagattgctctgatgcaaattggatcatgtcacccaccttgaaccctctgccatgactgtcttgtccatggatgatgtccagattttttccatgtggttgttgagactcagcctgctgggcctctgaagactcatctcagccattgtacactctggtctactgcaggatgcatggtattcacttgcctctagtcaaacatgggcaaaaacccatgctgttccctctgttcatatgaccttctgccactttgctcctaacagctcacttgatttctgcaccacaaacctaactcaaccctaagtgtttcagatcttctgctaaccaggcctaatcttagacttggactggatttgcatcccctatcttgtgccaattcccagtaatatcccatattctcgagaagtcatttatcattcaaaaaatatgttcaccttcattttctcatctgattctctcagcagccctgggagatggggatatctgctataatctccattccacagacaaggagactgagggtcaggatttcagtgacttgtccaaggtcacacagtgaatagacactgggtctaggacttgaacccaggtcctctaactcctaaccccagctgtgcccttgttctgcatccttttcccacactaccccatcacccccaatgccaaccttcccaggcaggccctgagagggcgacttgccagccttctctcggacacacctgttcaagacaggcctggcaatgagaattgtgattgaacagatggtggaaacacaccgcaacaaaatctccttgttccttaaaatgaagtgttttcttttccttgactccatttccccagtgaatggggaatcatctgctcacatgactaaaaataagtgactaggaaggacagagatgaatgaggcggagagaatggggagagatggcaaagaggcagaagcgggagggaagtctttaggctgaagaaagacctttcagagaagaaaagctgtggctgagtgggcctcctgcatccccacgccacacagatctacgcggcctcctgactcttccagcccgttacttccttccatccctgattaataaaaccagcatcaccggccctggcatgttgtgaattgcagtgtgggctccatcaagcccaacatctgcttttaatcagttttccattgctcctttgattgcagttttgcccaagtcttgtcacaatgggtcccccgatacagccacacatctggactgcttccgaaggagctggaatgccatcaacctgaaggtggtcttagcaagtgggctctatcctcagacaaggtcacagaggactgctctttacaaagaagggaaggaggaagaactgccttgcctcactcggcggggctctgcactggcaggtggagcgaggtttctccccattgtgggccgttcttagctatgtgagctcatacacgttactaaacctctttgggtccctgttgcctcctctgcacaaagattggaattataggactttactgtcctgaagtcaggagaaagactttcctttccagggccatgacttatcctactgtggtttggtgactattcatgctctatcttatggcctattcatgctctatcttatggcctataaattggaagctgggatgaaatcagcaagtgtggtaggctgaataatagcccacaaattgtccacgtattagtcctcagaaccaggtattactttacatgacaaaagggcccttgcaggtgtcattacattaaagatcttgccatggggaaattagcctaggttatccaggtgggcccagtggtatcacaggggtccttggaagagggagacaggaggtcagagagaaggcaaagtgatgatgtgagcagagatgagagacaggagtgatgagccaaggaatgagggcaacggggagaagctgaaaaaggcaaagaaacacattctcttctcagaacttctaggaagaaacagccctgctaatgatgtcttaactttagcccagttaatctgatttcagacttctgacctccagaactacaacagaatacatttgtgttgttttaagacattaagtttgtggtgatttgttacagcagcaaaaggaaactaatatagtccgacacattttattcataagtaaaaagagcaacatattatacagcccaattcaaggcatatagggaagttcctgtgtccaaaagccacactctgggagatgcccccatttaagacatttctatgggcaagaataatgatatccccattgaaatgcatttccctgcagcagcactggccagtataaatatgacataaactacacagataattttgtctagtagccacatgaaaaagactacaaattaacaggtgaaatgaattttaatatattttcttcaacccaatatattcaaaatactgtcatttcaaccagttaccaataaaacaaatttactgagatattgtacatttttctggaccaagtatttgaaattgtgtatttaacatttacaatacatctcagctcagaccaactgaggtaggaggtgggactggactctggaagtggggcttggacaccggaccaaattgaggactagctaaggcagggacagggtagaagcagctttccacaagaaatgcccatgagtgtgacatgtcagtttaccattgccatggcaacacccaggagttactgcccctttccatagcaacaacacaaaagctatcacccttttcctagaaattctgcataatacacccctacgtgtaattaaaagtagatataaatacaactgcaaaactgccctgagctgccactgtcagcacacctatggggtagccctgctctgcaggagcaatcatggagctgtaacactgctgcttcaagaaagctgttttcttctactctaccacaggctcacccttcaattctttcctgggtgaagccaagaaccctcatgggctaagccccactttggggcccacctgccctgcaacatagtcacatggggctatgatttgatcttaggtccaagcagcatagttctaaaaggttaagactattggctcctaagagttcatcatcagttcatcagactctttctaactgaccttgagtggataaagggcctagggaatgtagcagccatggaagccctgagtaaagtgcaaagcagacatggttaggaatggctgcccagggtcaagccaatagccagtgagaatcagggctagaatccaagggcactgcctccctggccaggccaagaaggggaggctgagacttcagagcagtgaagctcccactggacacactgtcttgtaacttactttttatccacttagcaatgtatacagttagtaggctccatgtgcttcaatatccttcaagtacttaagcttagatgacatcaaacccatacattgtgagatgctgacacaatcatttcctttaggccactccatctttcttcacagccagtgagactccgggacccctatcacctcccctaaactcaatgaagtgggatccagtctccaattgctgccttcttgcctgcctctcagagggcctcatcatttcaaggaacttgcttcaatctgggagacagattaagtacaagagaactcaggaacttgggggatattttggagtttaaataaaacactcagtgtgaaatgtctgacccagagcttggtgtatagtggtgcaccccagtcccgagagaacctgctaattcacggctgctaataaatagctgaagtgaccagacttgagccttcccagttcatgctcagaactggccctgctctgtctggtccactgtgtcagggggcacatgccccttcctgcctctgctttgctgccaccttgcccccgcctcacggctgtgcctatagctcactgcttcacctgccaacccagagctcatcccctctctcccttcctgatttgctgtagcttgcactgactcagactgactacctgtccattggctcctagaacgtctctcatcatctttgcccctcaccttgacccaggaatccccagacataataaagatgatggttgacacctgactagtgctgacacctacgggtagtgttttcatggctttgcctagattagctctatgttgtgggcatttgcatgatccctattttatgtatagatgcccccaaagttcagagatgttaagtaacttctgcaaggtcacacagctgttgtgagagagttagcttttgaaccaaggcaatctggcttcagagtccatcagcttactcactgcatcaaactgcctctactcacgttttttcctggagcctggtacagcacctggcatacggtttgagctccataaaagctggttgaatgaaagcatggacgaatcacttttacggccctggctccaatggtcaagagacttcatcagtgcttgttggggattcccctacagggacaggactggggagtgtactgctccaccctccaagatgacaacttacacctcattaaagccttgttttggaggaatgtcctaatatatcacagggcctgaggagacataaacagcctgaagggctccctggttgacctgtgggccttggacactgacttcttagtgccttgagcagtgacacaggatgggggaatgtgctactgctgttcctcccacttctcactggccagctttcccctcattcagacctcagcatgttgttctgaagacaggagggagaaccaccaagtgagaaggacaagggcagtgctgagttttctctctgagggcaggtgtcagggtggagatgcgcagcacccaaccacagcccagtcctaggtggaggtgtggcgggaaagagaggggcagatgcagaaaggctggctttggaaatcatcctgcagtagtagaagaggttcttgtttttaattattcctataagatttttacaaacaccatctgatatgattttgtgaggctttctttgaaagccacttccagacaagcattccaggtgaagcagaattttttttctgggaccaagaagaatttttaaaaactaagtactagaacctgcaatggttcccttttaccaaataggttaaattcagagcattctgctgggcatcccgagtcctccagtaatcacttctccatcatcaccacctgttatatcccagcaaggtgactaggaaagccagagccaggaggggccccacattgatactgatgaaatcaagactcagagaggttaagaaatctccttaaggttgcacagttaagagcactggctttggagtcagaggatctgactttcaaccctggcccttccatttatgagccatgtgacctagtgcaagtgacaaccttgctaagctttggcctcttcatttgtaaaatgtggacaatcacagcagctcctataggtttgttgtggtggttaatattgagtgtcaacttgattggattgaaggatgcaaagcattattcctgggtgtgtctgtgagggtgttgccaaaggagattaacatttgagtcactcactgggagaggcagaccaaccctcaatctgggtgggcaccatctaaccagctgccagcgtggccagaataaagaaggcagaagatggaagagcaggcttgctgagtcttccagccttcatctttctaccacgctggatgcttcctgccctagaacatcagattccaagttcctcagcttttggactcttggacctacatcagcggtttgccaggggctcttgggcctttggcaaaagactgaaggatgcactgttggctcccctacttcggaggttttggggactcagactgatccaccactggcttccttgctcctcaacttgcagatggcctattacgggactttaccttgtgataaactccctttcatatatacatagatcctattaattctgtccctctagagaaccttgactaatacagttgttgtggacaatgattgagaaaatgcatctatttttctacagagctgagctatgagttagaaagctcagtatcagtttaccaagtgagaggcagaggcagtattagaaacgccgtcactctcccccaccctgtttgctttccgttgtgctccttagcctccctgtcatgcctctattccagacagactgctcttctaattagggacttcctcacctccgcaccttcgcacaggccatcccccagtgttaggaaactcatttcttctctgctggccgaccaacattacaaaaacatttttcaaatcacactgcatatcctttattattagcattcacatcagggtcacctctatcaaattctgtgaaagattcttttttatttttaagtccagaaatgtgtttattttggatgctttttatttgcaagtcctaaaatgtgtttattttggtacttgtgttcttttgctatgtttggtgaatatatagttggattttatgttcatttctaatcatggtaaaacacacacagcataaaatgtatcatcttaactatttttaagtgtcacagtaaaagattctcctgtaaagaattcttttatgaccctaccacatccctaaaactcacgccctacctcaccctgagcctttagctcagaacagccccacctacccacattaagaaggagttttaggcatctcccacctccacagtgaacttcccaggccctccagccttgcccttttttcagtcctaatgacacgctccatccccatgatggtacaactttggcacagagttggcctctctgatggggtcttcttggatctgatgctgagttccccgagactcttcacctggtctgacccagtagcatgggtcacagtcccaacccctccctgatgagatgatcccctaggccactgtgtcttcaatgttctgccttcaaagtccctgcccttccagcctaagagaagagaccacataccattcctgatggtccagaagtctagagtgagaatcctgcaaggaaaccatctggctgaccctggctgatccttggacatgggcatcttggtttggcatggccctatcactctgactcctgcccacccctgtataactaaaagccaccattactgagggcttcctctgagccagacactgtgctgagagttttacacacatggtcttacttcatgctcatgaaaacccaaaggggtgggtattattagccccattatataaccaggaacctgaggctcaaagaagtgaaggggtatgtccatagatgccgaggagctgacagtcaagcccagtactgcctgattccaaagccagtgctcgcagccagaatggaactggctctgcttcgctctcttcagtctccttacctctgtcatctccttggacacttccttttcagtgcatgattgccagcccccacccaagtcagctcactggccctggacactgaagctgtcagtttcccatctggagactccatctctaagacctcagattccaggccagggccacttcctctaataaaagggatgaagccacagacccaacctccagctgaaactagatttgctctacctgttcacaaaaatgaacttccaggtcaagcttttggccaagtctgacaaagtactgtgaaggccagccttcctgagtgttcactcattcaccaagcattcactgagaattccccaggactgtaccatgtctgggacatgggaatttgggcccctttatgctcagtccttggagagtgtatcttagtcctgagtacccaggcaatcggaaagtcttggctttaccttgaaataagaacgcgagcccactttattccacgatcttaactgaactacctattcctgatttaaacatttctttctggactatttgcatttatattttatatagttgcaacacaatgaatagacaattttgtgttttgcttttatcatttagaacagccaaatccagcctactacctgtttctgtaaataaagttttattagaatacagtcgtgtacattcatttacatactatctatggtgactttcacattataaggtagagttaggtcattgctatagagactgtatggcctgcaaggcccaaaatatttactatctggctcattacttaaatagtttgctaacccttgatttagagcattggaaaaatgttgaatagtctttctggttataataattaatggctacatgataccccgttaggtggcctgtgatttttaactcatcactttccatgtggtcagataaatttgttggtgtggctggataactgcaatgaagattgacgtggtttggctgtgttcccacccaaatctcaccttgaattgtaatggtcactacctgtcaagggtggggccaggtggagataattgaatcatgggagcaagtgttttccatgccgttccattgatagtgaataagtctcatgagatctgatgattttataaagcggggtctcctgcataaactctctcttgcctggcgccatctaagatgtgactttgcttctcttttgccttccgccctgattgcgaggcctccccagccacgtggaactgtgagtcaattaaacctctttcctttataaattacccagtcttgggtatgtctttattagcagtgtgagaacagactaatacaaagatttttgtgtgtttgttgaattatttccttaggaaaaatttccacatggagtcttaggtcaaatcatctggcattttcgccggggataatcaaaattctgtccctgttgtgtttgtcttggtcctattttatgaattgaccttcctgagccttggccaactgatacctccacctgaattcagaatacctttgttgaatttctgttctaggggacctttctgctcagttcactgaggtcgctcttccccacttgccttgacctgccctgcatctcccctgttcctcttcctctgcagcttgggtttgcacctacttccattcctcctctgccaaccccactccacacagtggttctattttctgtcattttcctgcatatctctcatttgcaattcccacacccacaggacatcaagcatccagaatagatcttttagtgtacaacaaagtggggttcaggccagaacacacacacagacaatggggaagggagggatgcatcacaagattcctcccctcggctctaacatgatgctgggcacccaggcccaagggctacttgtcaagaggatttaccagtccctgcctttgaccttgctgttgtccctgtctgcaattcatttccgcatttcctacagtttctggctcctcgaaaactttccatacattggcttctgatttactgcatgcatagactatttctatgggagagcggctaataaaataggaaaaactctaaaaaaggatttttgccgaacactgcatgccagtgagtttccttaattgcagcattaggaacatatgcaattactttcatcgagttgatctaacatagtcatttggaccctggaagaagcctaatcattctgggaggccaggcccctgtgttagaagctgttggctgaacgatctcatccctcttagtgaccgatgaacaagttcctctctcagaagcctggcctgaaactagaggctagagggtctctgtctgatgcttcactcctctgagaacctctctgccatggtcagcctgctgcgcttaagagggaaaggcaagagggagtcagtatttagggagtttattcattagacatgtctctcttgtgagaagcttaaatctcatgccttatattttctcctcgtggccctaattttgccttccaggaaagagctgagcaagtctaatcttttttgtagcggctttttggacatttaaggattaagatcctgtctccctctaatcttctccctggcagctgaaatatctccaattcctttaaccactttgcgtttgccattagtcctagatctcttgccaaaatagggccttgctagaagttgcaatacccgtaatgtaataacacagctagcatgtattaagtgtgcgttatgcagcaggttctaagtgttttacatctgggaattcatttaatctgcacagcaattccgtgtggtgagggctattactgttcccatttcacggatgaggaaactgagcacaggccatgattgttaaactgtgaattgggtcctggtgctgctactcacaagttgtggtgccttcatcaagttacttagcctcactttcttcaaccataaatgggaatgatgagctccacgtcatggagatgtgaagattctaagaggaagtgtgtacgaagtcagcataggttttcttcagtcctttctggggaaggctgtccttcagtttgacattatccttcccacatagaaactcagaaaatcacactctgaatctttggtctccttcctcttgcccagggtcacaccaccttgttgagtgaacatacctttccttcctttgccccatttaaaacagttggccctgagtaattgaagtcctgcacaatccagagtgaggattctggggattgtggacctatgacatgggctggcttctaacattggcactggtgagctggggggacacatctctaccatctgtgatccatgtacacatgtgacagtgaactactcccagcctctttgcctctgttctcagctctttcagaagagggtggttgctttgtggaatgggggaaagctgcccagatagctacttggtgcactttcctctctgtacatagcctgcgtggatgtgggtcaagggcccccgtgcagccctgccctctaagccacagaggtttccagccacaggcagctgaaatctctccagaaccttggttctttttatgtcagggctatagtcagtcaagttttccaaatgagcagttatagaaatacaaaacaggctgctaatttagtagctacagacttctttaaacaaacacttgaagcataaatacagatgagaggattttggaaacacttgtggtcactgggcccagcaaacaaaggggagttatggtttcttcaggctccagggtatgtgctgggctcagccacaccgaaggctgggcttagtcttcacctttgctctgtactgggctgtacatcctcagaggggaatgtagcctcctttgaatttcctgtccttcttgtcatatatcttccctttaaaagttttgttttgaaatgatgctgttgtaagaaataatatggagacatctgggatacgcttcacccagtttcccccaagggcatcccctgtcttggataactatagtacaatctctcaaccaggaaacagatttgaccgtgggtactttttgaccctctgtagcttccatagcttttcctttctcttctaatttcccttgctttctttctctcattctttcttgcccccttcagtcagtcaaggttctcttactggctgctttcctcttccattttctcctctttttttacactcctttcctcccgtgttactaggactagcgctctgttaaagcttctattttagctgtgtccttggggagaacccagaatcggtctgcccttgccttgctgggaacccgccatccttcccccaagatagcattcttactctcccctccctccaccctgtgctgggatcttagctggagagacacttccaggccagctgcattcaagcccacaaaactcaaaaaggatgagtcgctccaggattgggtttacccatctgattagtatcaacagtgctgacccaaatgtaccctatacaatgctgttctggctcccactgactaccctctgtagaagttattatagttaagatactcctctcaaaggtgggagactcttacagccaacctgattcaattttcccttgtagtttggaaaattgagactctgaagcgaaaggtttgtctagatcccatagcctgtggctaggaaatggtaagctgggccaggacctgcccttctggcttctcttccagtgcccctctcaatcaccaggaaccactgcctttccccagacagcaaaggagggggaagcccaagccaacagcatcagaggccttctgcgtgcctgttgtttggggatcagtaggaaggtcttggccctgtcttttctcatgcttttctttgttccctagagacagtgacttctgagatgagggcctgttaataggtgactcctccatcatgcatgggtcgttgccatggtgatgaagagctcatgtttggagccaagactaatgatcctagactcttagagattgtggccttgggtgagtcactttctttccaagccacatattcctcctcttgcaaaaggagcataacaagacattcttcacacgagtattgagataggtcaatggaataaggtgcattgggtttagctcagggatggagtcgcaggaagtgcacctagaacagcaatgaagaccattcagaaaaccctcacggctgggaagcagcatacactgcagcacacattgtggggtcacactgaggtaggagcaatggggctggggcttaaagctggactggacaggacttccctgaaaacttaagcctgtgaaaacagcaggtagcccacactgcccacttcggagcattctgaactccgctttcttttgatgaaactttttctctccctagctcattattagctcacatgagctctgcaggttagatatggagatagaaagtgatgacgccctgtgtctagggcatcaccctgctcactcacaggaaatcttcctcactgatcctggtggcctctgacctgctgtgctccagggtctctctctatactcttgttctctcagaagttcccaactaagtgattcctaagtctgactgtgcatcagaaccacctgcaaagaagaagtgaattgaattaaaggtttctggagtgagattgtggtttctacataaagctggaatgagagggagagaagtgaggggtccagggtgcaaaatttagggaggcatctgctatcaggattgtccaaatgcaagttctgcccctgagagtgagtgcctccttaaattttgtgccctggggggctagcttggtccctagttctgtccctgtctctagacccaaattttaaaaatcttgccagggattctgatgggtacccaggggataacaccaacctgctgccttgtttggcccctgatcataactgctttcagtgcaggcagcattcgtcctggtcctgggcaaagaagccatgtccaagtgccatggccaactcccatcgttattctcatcttctcggaaaccaagaaggagcatgatcccaagtctcgagtctcctctttgactttatttttctcagttgctaaaccaaatcaactcccttcaccccatctggcagtatggctctctgggaactcagattgatcttgcgtgcctgtttcctattgagttgggggaccacagtggccgttcctgcttcaatcccttcagtaagtaggagggagcatttcctaggctgggtcctaatggcacctaatggtgccaaaggccaggccccccaccctcctgaagctaacagggtaatgggggagacaccactaagtacacatccattcctgtgaactgtggggaggcctgccatggagaagcatagggagccaggccagtgtagagaaaggcacaacatccaccagccttagggatccaagagcaaagtcattcctgagaaagtgacattgagcagagttctcaggatggatttgcttggctgaaggcagatgggaacatcccaggtacaaggaaaagcaccgacaaaggccctagacaggtgaagactcagagaagggaaggagaccatcaatgtagccacagaggcagattgaacccagactgcatgaacaccacatcacagtctttccctacaagcattggccaagttttgtggaactttgggctgatgaatgacgccacctgatcggctttataaggacatcaggcagcattgtgcaaattgatataagggtaggaaaggcagaagaacagaaagccatgggcattgtctaggaaagacaggatgagggcttggaccgggctattggaagtaaacatgaagagaaaggatggcaaaagtctgctgagtcaatttctccaagcagtttttccctcctcccctcaaggctggaatagtggccccttctctgcttctatggcaccctttgctgtcctggatcagggctcctctcccactgcggttgtcttcctcaggatagaaactatgtcttatttttaattctcaccaccagttcctgctatgtagcagtgctcagtccacatctaatgttataaagtttagggacttggcatgactgaggcttcccagccatcacctgacaattcaaatgccctcaccttctgagcagcttccagtacatggcttggaatgggggtcaattgcagaaaaggaaatagttattgtaggtttttttttttttttttttttttttttttttttagatggggtctcactctgtcgcccaggctggagtgcagtgatgcgaactcagctcattgcaacctccgcctcctgggttcaagcaattctcatacctcagctccccaagtagctgggattacaagtgtgcaccaccatgcccagctaattgttctatttttagtagagacagggtttcaccatgttggccaggctggtctcaaactcctgacctcaagtgatctgcccacatcagcctcccaaagtgctgggattacaggtgtgagccaccatgcctggcctattttaggctttttaagtgtttttcctggtgctctgtgagtctcctgagaatgggaccatagctgtttgtttaccatggtaccctcagtgcccagcactttgcctagcccacagtggatgctcagtgaacacattggatgtgatggggggaaaggcaggggtactgcttaggccattgctggctgcaagtgttagaaacccaagtcaaaataggtagtgggcatgtgtgatttgtctccacagcatccatgtccccttcttcaatgaatgaatgaatgaatggacagcttccctagccttccttaaaatgctgtcttgctctgggtcaaaccttcttgttctaggtcacgaatccaagaaagcccttacctccctgggccccacatgggcatttggagaaagggcccatagggctgtttccaatcagttgcctcctttatcttcttccatgtagggttcaccttggggtatataaatagcagggaattttcttgatgcaactttttttttcatttttacaagaataggtcagaggaagggccctgaggggaaggttgaaggacctcgaaggaaagagctggcaaacagtcagcgaaagcacactttcctgagattcattagttccctgaagcagtggaaagaatgcagagaagtctagttcttatctaaaataatccctgcttcccttctcctgaggatcctgcccccactagggcagggggagtgaagaggggagggcacgaaggtgccattgtgctggcctatcacccacttcacaaacccaatccacacaccttacaatcgccctgagggaaggatactcaacttactttttttcagataaaaaaaaggaggctcagagaggttaagtcacttgcctaaggccacacagctagtcagagaaagtcactagaatgtcagatataggcacctagagagtgtcactagaaggccagatatgggcacctctcttccccacaagctctgaattaaaggaacgtggtaagtgatcctactggaataaaaacaagagggcaatcacagtgggtggctatagccaagggaagttcctcagaggaggccaggctcaaaagcaattctcatggagcaaggagcatgataccgagggagatgaagaaggatgtgtgctgtgtcttttgtccacaaagcacttctggaaatggatagaatcatccccatgtttcagatgagaaaattgaggcccagagacttgagtaatgtgctcacagttgcttcactcgtgtgtctgttgtgcccatgtgatccggggtccctgccctctgggctaggaacgctcccaccaggaactgttgagcaataatccaaagctggttgtgattccgaggcaactcaagcagcacagacagtgatttcatccccaaagagcaaaacatcaaaacagttcagaacaagacagggagtcaggcagtgtggagcgtggctgctgtaggtgggagaccaaagagcacgggagtttggaggctcttgggtgagtgagtgttatgcccagagagactcatgactattcaggaggcgttgaagcctgtttaggagcactgccctgggtgagggaagagcaggggagccggggctgacaagcacttgtgaggaaagaaggcggcctgggggaaagagtgcagagggccaggcttgaatgcacggagctgctcgggtgaagactcaaggagcccttgctctggtcccggcactgcgctgggctctgggatgtgggaagcataaggcacagagcctttctccggggctcacaggccgtggaagttcaggatgataccacgtggaaagtgctgcaatgaatgctcttcccaatgttgtggaagcaaagaggaatgagtgtgtgtgtgtgccatggccttggggagaggcttccagagaaggtgccgttggacagggaatgagaggatgtgcatggagtatgttagagatgcagggaacagacatttcccaaagagaaaagacatcatgactaaagcaagtgcatggttttactgggttctgaatcatagaactgtctggaagacgaggagttggggtgatgggtgaaagacaggggtactgcttaggcaattgttggcagcaagtgttgaaaacccaagtgaaaataggtagtgggcatgtgtggtttgcctccccagcatccatgtccccttcttccagccacagctggttccttttgtgtttgtttgattgaagtgggggtgtctacatctcctctaccctcagtccctctggtccagctgggactttcacaagcagctccaggctgaagcacaggattcaggcctaagccaactggcaaaacatttccccttgtgttgcaagttgaattgtatcacctaaaagtttatatgttgcagtgctaactccctgtctgtcagtgtgactttatttggaaataggggtctttgcagatgtaattaggtcattctagagcagggaggggtgctgatgaaagaacaccatgtgagatatagactcacaaacacagggagaaggccacgtaaacacgaaggcagagatcaaggtgatgcatctataaagccaaggagggaggcatggaaaatattgttcctcacagccctctgaaggaactgccaacaccttgatcttggactttgtcctccagaactgtgagacaatatgtttctgttgttgaagccacccagtctgtggtactttgttacggagaccctggagaatgaaaacacctgatgatactgactggttctgtgttgggcagcagacctaagctggttcaaccagagtgacacgtaacttttgcaggtgtcacctgccatgcctttggccactttctgttggattgcacctgaagttacagcagctgccaccataagggcaagcctttgagaatggaggccacagagaggaagcattgccgagacggagagaaagaacccaggtcctaatgatggtgttggcatacctgcatcaggccgcggccagagctagctctccttctagactgtgaagtcatagaagccaacaagttaactttttgcataagccagtttgggtaagttttctctaatttttgacagagttttgacttacacagtttaattaaaaaaaaagaaaagaaaacggggaaaaggatttcctagagggaggctgagactacatacagaaaaaaaataaaataggaaggaaaagctataataatcacagcagctgcagaaatcttgggaactgtaagtaggaatacattcggctggcacattctctttttttctcctccttttttgaatggggtgaggggcagggggtttccacgtgtgacagcagcatagcagcacagtcataatcacaccaacatgatgtgacaggccaaagtagcaactgccaactctgggatcacaccctgagagtctcagtccagtttccagagacagctcaggaagtcccaggggagggttttgattggcccactcaagatcatcacaatggcccatggaatggctcctccttatctgaggcctgggacaggcctacaagctgccattgggtccattccaggtctgacacgtgattctcattgtaggaaacagtaattctatgatctgttaggagaggttcagaaagaagagttgcatggtcaaatagatgtgggtgaccttggattccccagttacgtagcttgacctcagacttctcagagcctttaacatattgtgtatgttgaggatttccagggggcagggaatatgtgggcaacgttctgaaacttatccgatgataaaacacctttatcccagagtgtctaaaggattataccttttaatggtaagatgtgtgttttcctcatgtttgttttctcctctgtatctagactagtagattgcacacagaaggcactcaaagcaatcccagaagcccagtgctggaaagggcctcaccattcagctggcctggtgttccttgtatgtgaatgtgtttatagcgtcccgctacaactctctctgatattaccacgtctacactaacttagttgttttagtatcgacatggtgcctcccaggcaacgcagtgtcctggatgagaacgggatccctgatgcctccatgcttctgagcactccctggtctgcagggaccatgggtggcatctgaatccccagtgaaattccctgagcctcacagtcccagtgggccttgtctgtcactgagttacaagccacactcaatccctggagatgctgagtgctgttaatggacacgtgatgccggctaaataaaaatgattttcaacctccagaaagtatctcagccgctcacaaagtcatccactgtgtctcattgtatgcacgtcttgttagctccatgctgttcttgatctatagcatctctgctgcctgtgcgttgggaggcagacacatgtcagaaaatacagacagggaaactggaaaatgccagtgccagcaggggctccagtgagcatcctgcccaacccctaccttgtctttatttgtttttactcctgtaaacactggcacagaaaggtaaaacaactcgcttgaagtcacacagcaaataagtggcagtgttgaaacctgttagtgctaaggtccagaaaagagttaaataaatgtttcctaaaatgtatttctagagagcactgctctttaggtaccgtcgaatccgtgttggaaacactatttgatatgatgtgcttggagggggcacactgcctatcagcatggtagaggctctgaacaccctgcagtaagggatcctgttgcattctgtttaactagtgttttccaaattcatgtgcccaggtaacttgcccttccttttcataaaaggccatcctaaagaattagttcctcagtacctaaacttgaagtaagagccagcctttggctttgtctgtatagttgtggcattgtggagggctggggtaaggggccaggtagggcaggagtggagagcagggaggaggcttggaggccttagagggccagtggcaagaaaatcaacactggggaagcctgggcctgagcgtttccttgatcaatggctttgcctgtttgcagacgcataagagtgccaggccagaggaggtggcttcagggtggaccctgacacctgaaggtgaaatctagtgagttccaggctactgtcaagatctagggggaaggggtggggttccaaaggggatgggcaaggtagggctatgacttcaaggggcaagcagttgacactatgtggacagtgattctctataaaaaggggatggcagagcatggaaacaggactgaactcccacaaaacagggtggtggcaacattaagggggcatgccctctaggaaggcagtggggacactagggagatgttcctgctgtgtctgagtaccagtgccctgggggacagagacatcccaagtacctggggttctgggcagatgtggagcaattggatgctcaacttctcctgggttacacctctggggttatacccgcatttggggcataataacctgcaggcccagtagagctggccgctagcttggagcaaagagggcttccaaactccagggaaagggcaagggcaattagccagtccatctgtgcttccaggagaatggcagattatagctgacagattcctgaatactcattgtcaacgactggagtagacctgtgtccaggctcacatcagggcaggaacccagaaacccgggttacaatcccaaccatgccaccaaacagctctattttcccatgaaatcagttcttctttttctgggtcccagtgtccgcatccttaaaatgggttggcctcaattatttcttgatttccttcgataacttttaaattctctggccatgcaagtcacccctcaactgatcttctgtctgcttgtgttacaggttccacacatcactgttccttcttcttttgtagatctaaaatgagactcttaccctagaattataaaagagaaaaatttttacaggaaggcgcatttaagaaaattttcaaggaaggcacatttgagaaatacagcttgcctgggaagcaaaattgataataccttgtgattcagccacacttggcttgagctcagcaagtcctgatgcctccctgggcatcagctttcccatgagcaaccatacaaggtaattggaaacgtcaaggaagacaatgggcgtggaagtgatttataaagcatataccctatagtgtgctgtgcacatggaacggcgttggagatgagagaatggtgatgaagatgataaaattgctggatttttaggttaaaagttgtgataaacagacaagtgggtttattacaggcaaaatgctactttctctatttaatacctgtcctggggctattgctgctggaaatcaaagcaatactactgtcccaccccccttgcaagaaggaatcaaggaaggggttaagattatcctgatgtcaggtaagtcctctcttattcctcaggcagcagtgagtgaatcaaggattttcctgggagtcagggttccccaggaaaattaaccaggatattggctcacctcactccagtaacaaaggcaaccctgttgataaaagacggagccttggggtctagtcttctcaatcttatgcactctgttgctggcccacagaggctctacatcttaccttctccctctcctcctcctcctccaaatcaaaacctcttggagctcagtgagtggttggattaggaggaaaaggaccagaaggcagttcaaaaatggcactggactgactgcagttctgatcctagctctgccaccaaagaactccaggaccttgagaaagccacagtctttttctgaatcagtgttttcatctataaaacacaggattcagccctagggacactatcaactccacattccaggattaggatgaggaatgaggagagacattacaccacacccataatattgatctgagttcagagagcttgagacggaaggacacattgcagacacaccagcaacatgaagagaatggggaaggggcaaatgaggaaatgcagctggagctggggaggagatatttatgcttttcaagaggcagacctcagcctcaggacaatcccctaggaactgggtaaccagggaaatgggaaaataataacagtagctagcattaactgagcaccaagtttgacatccatctttccagtccctctccctgtgagttttcagaatttgtatctagatattcatcacctctttcttctctcctgggcatacttgtatggtactgcccacagctaaacactatttcagttggagtctaaaccatcctgactgtcagattgctatgtttctatacctggacactttactattgacttagcctgaaatcgtgttagtatcttttttgttgttgttgagatggagtctcactctgtttcccaggctggagtgcagtactgcaatctcagttcactgcaacctccacctcccaggtccaagagattctcgtgcctcagcctcccatttagctgggattacgggtgcgccaccaccacacccagctaatttttatatttttagtagagatggggtttcacaatgttggccagactgttcttgaactcctgacctcaggtgatcagcctgtcttggcctcccaaagtgctgggattataggcgtgagccactgtacctggcctgacctgtaaagagagtatctttttaatgtacttgttgccgcatactcctggtgactgttcagcttctggccagctactcagccactcctctcagatgtttctttatcattactgcaaatcagctctttccatcctgtccctgtgattgattcctgggctcagtatgtagaacttgacatttatctctgctaaatttcatcctgttggttcaggtccattgttcctagctgtcagagtttaaatctaccctatcagccttctcttccagctttgtgtggggctatgggggtgagggagtggagctggctgtggcagaactgagatgggtggctgctgctacaaggcatggctcagtaaagtgaagaaagttggatggggatgaatggagtttatggaatgggtctggctcagggctggtacagagcatggcaaatagcacaatagataacatttattatgggttggtcaatttgagtttggtgatagtgtacaaggcagttcaatatggtgggcggggcacgtgagcagtagtcctaggcaggtgtaacaccagaggggcacagcactgagattccagagggtcagagcaacaagagtgagacccaatcagtgactgggagaacagaggcaagagtccagtgctctggaagagaaagagcattttcaaggactaggcagggagttaacttagacccctttctctccttcacctctcacacccaatagaccaccaagacctgctgatgctaccatacaactatcttgcagttaattttctttccatactttgttttatctccagtttaaacattattgtttattgccaaatctatagattactaactgatcttgcattctcaatccctcccgctgtataacgcacaggatctttcaaatttgtgtctgacctaaacctttttatggttccccatcatcggtagcatgaagcacagactcctccccatattgcaaagaccctctgtgatctggcttctgccatatcctcagattcaacttaagcttaatctattccaagtgagttgcagacatcaaatcttctagcctcctagtctcagcacatcccgatctctctgcccggatcgcctactagccctgcactttctcatctgtgaactctcaaccttgctatcctagtcctgacatagcctcttaagggaagcctttcgggagctcaagttccaaagcctggctaccccagcaccagggtgagcagctctcataactcattatcatgcattttattagagtttatttgtgtacctcccttactggacttcaagctccttgaaaaaagggattgctttttaaaaatctctgcatataatatgtgatcagacaggtttttgatgagatggacatgaatatcaaggtttccatatctgcagtctggggttagggcagagtcctaggatactgggatataggagtaaaagatagaaatgaggctggacaggctgggtgtggtggctcacgcctgtaatcccagcacttcgggaggccgaggcgggcagatcacgaggtcaggagattgagaccatcctggctaacatggtgaaaccccatctctactaaaaatacaaaaaaaaaaaaaaaaaagaaaaaattagctgggtgtggtggcgggcgcctgtagtcccagctactcgggaggctgaggccggcgaatggtgtgaacccgggaggcggagcttgcagcgagccaagatctggccactgcactccagcctgggtgacaaagcaggactccgtctcaaaaaaaaaaaaaaaaactagacaaagacctaagtcattagggtgtgtgagtgtgtatgtgtgtgacagagaggaagagagagaatataccttgatctctaagcctgccctaggcatcaatgaaaaaatatgaattcccttgattagcactaattatgggggtgtgtgtgtgtgtaccgtgtacatgcacacaatctgtagtgtagcattatgagaagaatcaggcttttagaatcaggtttattgaaaagaatcactaaaccagggtatactgtttctgctactttgcacccatgtgcctttggataagctcatcgatctctcggatcctcagttttctcatatgtaaaatggggctaatcatgtctgtctctgagtcaatgtaaataaaaaaacacctcaccctgtgcctggcaagcggcagatgctcaataaatagcatgcacttggttatcgtggttggtccactgaggaaatgtaagcccagcacaccagctggactaaacatggtcttcactgcagggaggctgaatgtcatcaaaaggctcttcaggaaatgagagcagaggaggagacaggatgttaacagcctgattcattaggaactcttcctgtagtcttcactggggcagggtcaaggggccgggaacacttggacaagctgctcggcacatcctcttctgccacaggccggagtctcactcccaatacctgatgctctatcttccccctcaggacaatgattctattagtccctgaaaacagctctgtttacaatgctgcctcatgacaggcaggagggcttccaagatttcagtttatcttccattagctgctttttaaatttatgccttcctcccagagagggcccacagactctatgctgagatacagagacagccgcagcttggccttatcggcaagcacaccgataaatcatcgctctgtggtttcatcctggggaagtgatacatctcatctcattggtttgtttcccaggctgatattttctgatttcctacctagactctgaggtttattctatttggagtttgcatcctcttatgccaaggatcagcaaacgatttctgtaaaaggccagagagtaaatattttaggctttgggacacctatggtctctgtcatatatgctttcattctcatcgttttctcttttttttttgttgcaaccctttaaaaatataaaatggctgggcgtggtggctcacgcctgtaataccagcactttgggaggcagaggcaggtggagcacaaggtcaggagttcaagactagcttggctaacgtggtgaaaccccatctctactaaaaatacaaaaacttagctgggcctggtggcacatatgcctctaatcccagctactcaggaggctgaggcaggagaattgcttgaacccagcaggcagaggttgcagtcagccaagatcgtgccactgcactccagcctgggcaacagagctagaccctgtttcaaaacaaaatatatatatgacatttttagttgggattgtataaaaatatgccatagtctgaatagtgtcccaaatcagagggccacagttcgctgactcctcacatcattcactaaataaatgcaatcacaaacttattcccctcctctaccttttgccccatttcctgactcctcctccctctcctcccttttccatcttttctcttcctgccctcccctccccgcttcctcctccccttcttttacttccgtcctcttccctccatgcccctcctcccttgctcccttcttccttttcttctttcctccttcagcatttacagagcatttactaggtttgggggtgctgtgctgtggctcagggatataaagatgagtacaacaagagccttcttctcaaggatgttccagtatttgaggagatgaagcctgcaactgtagacggtcaagtgtactaacaggaatcacaacctgtctgccttgacactgtgtgggcagtgtgacagcgttatctcgggctaccacctgcaggccatggaagcccagtagagagagaagacagagcctgcctgcctagggagggtggtggccatcccagggaggtggggccagtccaagttggacctcaagcaagagtttacctcatagtgctttccatgcagtggaaacatttaagcaaaagggtaaaggcaggagagtacatttgagaaaggcattcctgagaagtcaggtggggtacacagcacacctaaaagtggaatgatgtggcaggtaggagcttgaagagcatttactaggtttgctcaagcttgaagctgctccaggctgccttcagtttctgggtttatccttccaacctggcactgtctcccatgcaaacctcctatgatgcagacccctggaatagctcccatcactcaccagcaccatcatctccagaaaaagccctgtcaatatttacccatggaagggtgacctcttacttctgaggagttttggacctgaatggagttcagttgacaaactgtcagagccaacctccagagctggagttggttacaatctcaatcctttactcacgtttggggatctttgggccagctccttaagcttcccaagctggtttttgttaagttataatagtgcctcccataggaatgctgggagaaagatgtgagttaatgaatgtaaagtgcttagcacagcatctggcacagggtaagtgtctggtaaatgtcagttgtttctatcaagagaggggaggaaggtaggacggagggagggcgggacaggatgctggggtcagatcacacctgcctagaactgactttggactttagcatgtaggtaatggggaccatttaaaggttataagccaaggcctcagatttcaccccctttaggctctaacccccttttagactatggacattggcaaaacctatggggcaggcttcataatgtccacttcacagatgagtcaagtgaggcttagggagcttaacctcttcctcaaggccaatcggctcatctgccgcaatcccaagtctggtttcctgaactctgtgttctatgctcttccctcccacactgctcgctaacagactgacagacggcatcatgccagccttgcccaggctccagttagcagacaaatcataactggctggcggggctgcgtgcctgctgcagttgtgtttatcattcatcagagaagagaagcaacctgccaggccggcaagtcaggccccgcagagagaagacttaaggtgatgtagcctatggggctggtcctggggatgaaaatttggattgttggatatgcttaggaaaagaatatttcagcaattcactgaaagctgaatatagcccttgcccagggagtgctttgagtacttaaggaactggtgaaagcaaggctagactgggagccaggaggcctgggttctgccctagccttgccattacaataggggagaaagcacatcttgttttaatttctggatttcagagtcctactgtgtaaaaagaagagtttgggaaaattcagcttaagagtagatagtactgtagtggggttatggaaaaattctgttcccttctctttaaatagccctccagagggaggtagtagctgtggggtagcacagagcagtgaagtgagcatctatctgcatgtgagtctggactttgcctgtaactcactgtgtgacctggagttttccagccctgtctcagaacctgagttcttgtatctgtacagcaggtgggttgggccagagcagagatctctaactgatgacctgtgagctaaatctgacctgtggatgagactcatttagttcccagacagattcatctttctaattattacccatttttttaaagtgacccaacatttaaaaatcagaagaattcacatacaattctggattcctaagttttcttgaaaaagcagagggtagcctggcatggtggctcatgcctgtaatcccagcacttggggatgctaagggtgggaggatggcttgagaataggagtttgaggccagtatagtgagaccccatctctacaaaaactaaacagaattagttgggtgtggtggtgcatgccacacccaactaatgggtgggaggattgcctgagcccaggaggtcgagtctgcagtgagttgtgatggtgccactgcactccagcctgggcaatagagtgagatcttgtctcaaaataaaactaaacattaaattttttaaaaaaaagaaacaaagggcttagtcacaccgagcccccattcacactgggagcacacactggcattgttcctttggactggtggccactgccagttcccaccattaccacccagtaccctgggctcattcatgtcaccagcttgtagaagcatctgagagtgcaacccctgcacgaggccttgtgaacccacattctctgcccgtagacatgaacatgtcaccctgctctctgagacagagacccagctcctcctgggggtcatgcaccctccgcagtaaggccgtagagtctgttgtctgcatccccacacttgcttagatgactgtattacagcacacagcaattattacagattttcacatgtacatttatattagtgtagcgaacatgctttttcaagctactgcacccttttggagatgctgagccttttcacagacgggtgcccaccccacccaccccatccatgccccctccagctgtatggctgtaagactctgtggctgtcaccctaattcttggttcatcggccatacccagagtgttcagtcaccatacaaaagcaggatgaggacacaccaaactgacaagcagtgactctccaatagagggtagttcctttcctggatgctgcttttatttctgtcttctgctcagtctcttttggctttagacacacacccatgttcttggaaactcctttggataatggctgccacctccaactcagcatgtcccatctagactcatcatcacttcccctacctctattcttgctccttttccctagttctttatttcaatgactgggcaccacccagttgccctagccagaaaatggggagtcatcttctatttctccctttcactcatactctaaagcccatcaaaaccaacctttggtgattccaccttttcgaaggtgcccacttcctccctgtctcactgcccacatccaagtcaaggccattgctgcctctggcctggactcctgccatagccagagaacttggggtccccttattcatactcactctactaccctccaatcccattgcacaagccagcatggtctttgaaaaacccaaatctgatcatggcagcctgtatttaaaaccttttcaacacttaggataaagacccaagtccctaacaaggcaggatgtgggtgctctgtatatagtaggtttggaggcatcctcacttgccacgaaacccacagtcaccaaaagaaccaagcctggggcttccaggaagcagctcatgtggtaatgcaaaccacagaggtcaagagggctcttagataccctcacctagggctgcccagcccttgtcagtgcaataaggggaaagcacatcttatttttatttctgggtttcagcgtcctgtgtaaaaggaggagtttgggaaaattcagcttaatagtaggtagtattgtagtgaggttatggaaaaaatcatatcacttttcttcaaacagtcctccaaagggaggtcttaatggttccaggagctcagtctgaccaagataagggtgaaactctgcagtcactatctatgctgaaagagaagcatctttcagtgctcctcaagatttcctaaaaagtcacctccagaggctagagcctggaagaattggcaaaacatgagtcatcattattttgacttgaaaggagggacagaagcttctccatggaccaggttccaaggctagttggtcatagctgtaggcagcctgtcccttagcatcagttgtccttgatcttagaaacttaagactgagaggagaacacttctttccacttattattattgctcccactgggtactgagcctgcagagttatagtgtgaagagagatgagcatttagaaaaataaaaggagaataagaagatgaatgagtctcagaagggagtgaatccaccagatttaaaaagagaccagggaaaagaccctagtaccatcacgtctacactcctgcttactctagctaggcccaagcttgaagctgctccaggctgccttcagtttctgggtttatccttctaacttggcactgcctcccatgccaacctcttatggtgcagacccctggaatagctcccatcactcaccagcaccatcatctccagcaaaaggcctgtcaatatttacccatgggagggtgacctcttgcttctgaggagttttggccatgaatggagttcagctgacaaactgtcagtgccagctggtagccccagactctgtgcaaactggaaacctgaaggccagggaagggaagtgacttggccaaggtgaacatggtgaacttggctcctggaccatgtatcctgttgtccagtcttgtgctctttgcattatacgaaatagttttattgatcattctacaaagtaacggaattttcaagctaaattttagcatgggattcttggggatgggtataaatgatgagggtgctggcatggcaggactgctgtaggaagaagagaaactaataagagtaagagtagaatacttctgttgttctcaattgcactaattttagcttttattttcattaaatcactctcctgtgttgttttgcatttattttatgattctttatctaatttcttaggttgactacttagtgcaattattttcagcttttcacaagaaataatagaggcattgagtgctataaaatgtcctctgaacacagctttagctgtgtcccataggctttgatgtggagtattctccttttcattactttctagataatgcataacttctgtttttatttcttctttgagccaagaattacttaggaaagtatctcttaatttcaaagtagttaagagttttggggccattggagacagaatgaagaggagttggctccaaagaagagacaagcaattaaagccaacttcccaacttctgtctggtgccagctaggttgggcatttttgtcctgtcttcactgatttggggcagtaagaggtgagaggaagttggggaacaaaaccccatgacgtcctcagtttagtgtctgttctccttcctgccactcaggctgtgaccaaggggactgcttcctgctctgtcccctacacttggctcctgtccttgcccaggttcaaaggcggcaccttcccagaaggctcactcccatctgtagctggaagtcacatctgctcagggctgtttggaggctgccttctgttaggcacagacctgtgccccttccagcccccagctcaggggtgaccttagacgccatcataggtgtagggagggcaccaacactgccctcacataatcggatcaatgaatatgagcaccagctgtgccagacacactgctgggggcatgacacatggaacctcgtgtacctcgtgggtagacatcactcccatttggcagggatggaagacaattcccagctgtaggcagttttctcaggtacacagctgggaactggatgcaaacacaggtttctctggctctgaacctttgccttcatgctgcatgctctagcctaatcttgaccacctgccactcctgactcagaattttcagatgagagaactgaggccctggatttcaagggacttagctgtgcatgacacagcaaggccccaatgaactgaaatgaaatgcaccactgagaagcacacgttcatggccctgccttgctgatcctctccttcctccatctccccatcctctcttccacacccccctcaacctcatcgcggtccttgccttcctaactggtaaaattgagaaatttggggggaatgtgggaggaattaggaacaggccaaaggggaggggattgtagagggaaagcattgtttttggacaggaggccaacaagacaaatggactcctacattccgagcatttcagagccacctgtttggacttctgtcctgcccttattgatctttccagggcatttccccagtgaccaagaattacggatctttttctggaatgggatcccataccattacaatagatcatttaaggacttttatgaccgtgctgctaggaactaggattctaaagtttaaaaagatcacgtggtcttggaaaggcagccttgtctgtcctctacctcatgggctactccaccttcttccctgattcatggctttgctcactctctaaatcactgactttctcggccccttggctgtgtggccatagagaagctgctgggccttgaggagtcatcccgtgttatcccctggaagcaggacctcggtcctttctcccagatgttctttctcacctcctgccaaactccgtgccagccctcagcaccacagcctgagaagtcatgctttcttttgtactgtgtccacggatatgtgcccagcctgtcataggtgccagtaagtatttagtgaataaaggagtaaaagaatgaatggatccatcatgaattatagctgcctagctggcacttggtggatggggcaaggagggaagtgcacagggcagaggaattgctccgtcgctgttcctgaagctctggggttgggaggggatggaggaggagagcacattctgtcccaaacccctctagattcccaggacatacccatacactccagccctgcctagtctctcccaaccagccttggctggctctggatcttcctatggggcgctcaggtgggcctcagaagtagaccctgaggcagccatggacattcacagcctggtttattcagcacagctctggcaccaaactcactccatggcctatgggtatttcaggcccatgggttgaacctctctcagccctgttttcttctctgtaaaatggagatgagaatactcacgtgttctagtaggaataactcaagacacggaatgtgaagtgttagcagagtgtccagtgcctttgagtgcctctctcctcccttctatttatttttaaggctactcatcctcttccaggccttgtctgacccacggcttctgcttccttcccgcatggctggggctactggatccttagctgcaagcttagccctgcccgtggctcctaggaccaatcctgaggcttcaatagtcccagatgcccactctcggacttggcttgctattcctgtcctgacctccgtcctgttctgaagaatgcagaggccgggtgcggtggctcacgcctgtaatcctggcactttgggaggctgaggtggatggattgcttgacctcagaagtttgagaccagcctgggcaacatggcaaaacccggtctctaaaaaaaaatacaaaaattagctgggcgtggtggtgtgcgcctgtagtcccagctacttggggcgggggatggctgaagtaggagggtagcttgagttggagaggttgaggctgcagtgagccaagatcctgacactgcactccagcctgggcgacagagcaagattctgtctccaaaacaaaacaaaacaaaacaaaacaaaacaaaacaaaacaaaacaaaacaagaacgcagagcgcagtgtccagctgggtggagcccagaactgcagagatgtgctgaaagatactcccgaggccaccaccactcccacattgccttccttcttcacacacaaccagaacgtgcagtttgcatcactcacatagaaattaccaaagttattaatcacagcgtatgagtgtgtgtgtttgtatgtgtgtgtgtgtgtgagtgtgagtgtgaatgtgtgtttgtaagtgtgtttgtgagtgtgagtgtgtgtgtgtgtgtgtgtgtatggaggaggggtggtgatgctgttgttgctccttcagttacagtaatggcactcaacctaactacacattagattctcctagaaagacttgaaaatgccgatattcaggcagaagttttgatttcattggtctggagtggaccctggacattgggaattttattagtgctattaacacttccaggtaagtctagtgtgcaactggtgttgggtacaacggaacaactggtgttgggaactgatgtgagctcgctgacatcagggatttggctttatctattttgtctccttggaggtgcctggcttagtactcagtgcctgtaaatggatcaggagtccctgtctctgggacactttgcctgaccaccctcctccctcccatgcctgggctaggtgttgtgctcttattacactgggtttgatttcctgtttcctgtctgtctttttcaatagacaatggactgccctagggcaggatccagattttcatctctggctcctttgtcaaaaccctcacacatcagaatgtatcggtgccgcatgggtctgaggacatcttatcccttcttttcagggtccctggtagttaacgaagcctctcttttcttctagatgttgtttctttgctttgggaaatggttctcaaaccctcataacctctatcttagttataccttttgctgcatattattattattattttgagacagagtctcgttctgttgcccaggctggagtgcagtggcgcgatctcagctcactgcaatctctgtctcccaggttcaagtgattctcctgcctcagcctcctgcgtagctgggattacaggcatgcaccaccatgcctggctagtttttgtatgtttagtagagatggagtttcaccatgttggccaggctggtctcaaactcctgacctcaagtgatcgacccacctcggcctcccaaagtgctgggattacaggcgcgagccatggcatctggccttttgctgcgtattaaattaccctacaccttagcaatttataacaaatggtttctgtgggtcaggagttgggagtagcctagcggagtgattctagccgaggtctcttgtgaggttgcagtcaagatgccagctgggggctgcagtatttgaagacttaactggggttggagaatctactctgagggtcaatgcacacaagtgagagagcactcaagccagaggccacagtcttttaaaatgcataatacaggaaggggaacatcacacaccggggcctgttgtggggttgggggaggggggagggatagcattaggagatataccaaatgttaaatgacgagttaatgggtgcagcacaccaacatggcacatgtatacatatgtaacaaacctgcacgttgtgcacatgtaccctaaaacttaaagcataataaaaaaataaaataaaatacataataatcacttccttcataggtcgcctagaccaagcctgttgcaatgtgggtgggaactacacaaggaggaagaaccatgtgttggagtgtaacgaccgcaggctgcatgctgggagctggcctggaagtccagagagggcacccagtcctgatcccagcctctgatcatcatcctcttgaacacaaatatctatttgcccctctgatgtgcaggaacagtgcaagagatgagtgtcatcctggcctctttttgatttttttggagaagggctaatagaaaatgtcctcttggctatcagtcctgagctcctcaataacgcctgaactctgtagaaatttggaaattgaaacctaagagtaagctctagaaacagatacctccaggatgtgagcttatttttgatagccatggcgtttgaagccaatggaagtgcgggcgaaggagagactgagaaatgctgcccacgtgggctctgaaaaaggctaaggttggtggagtcccagcccctgcatgatgtggcagggggcaaggccaaacttgccatcagctggagctgacttcctgagggaggcagcaggtgcagtgggctggggcaccatgagcactaagctccatcagatctgggtgggttcctttcctgcttccatttgccgtgtggcctccaccagctgttctctccctggggcctcagtttacccatccataaaatgaattggttggactgatacactacttatgaggcttttaaaaaacaatagcaccttcattttccaaattacaccttacaacaaataaagtgaatacaatgttactgcctcattacaatatatgagataatattatgaaagctaatatgcaagaataaatgcttagtgtgttcctaaagctgttcttaaatgctttggacacattaactgatttaatcccacagtggccctgtgagataactactcttttttttttttgagatggagtctcgctctgtcacccaggctggagtacagtggcgtgatctcggctcactgcaagctccgccttccgggttcacgccattctcctgcctcagcctcccgagtagctgggactacaggcgcccgccactgcgtccagctaattttttgtattttcagtagagacggggtttcaccatgttggccaggatggtctcgatctcctgacctcgtgatccgcccgcctcggcctcccaaagtgctgggattacaggcgtgagccaccgcgccgggccgataactactctttttaatcatcatcccattttacagaggaggcagccacagcacagagaggtgaagtagcttacccaaggtcacacggcttgtaagtgacttgaactcatggagggaggccataaggccttgctcttggcccttccgttatacaaatagaagcagagcggctctggtggaagtgagggaggaatgctggaagccgcccagcttgttacccttctcctttcctctctttccactgagcacccccttaaacacagttggcctcgggcttgtggggcagcttttgagctctgacatttgacgagctatgacccccgtatttctctacctaggctttgcaaacacatgcacctgaaccatctgggatgctttattcaaatctggatttctatgccactttccaggttcatgggatcagactctctgggtagagtccaggagtctccatgttaatcagcgcacaagtgggtctcggctcactgtcatggaaaaactgctgcattttgagcaggtaggcagcttaatcaccaccactgggcttggaaaggactggatttagcactttccttagggaggaggaggaggcctccttaaggaaggtctttttaaggagagtgggaataatctctgtgcccaggcactgctagaccgtctgtcaaacttgacctcacttcaggccacccacgcaggttgctgtaaccgagagtgagccaggaacttcaactgaccaagagcaaagcctgggtcgtggtcactgtgacattccaggccacagttaatcagcacatctgtgaatgcaccaggtgatttcagaacattttttatgcttcagagagaaaacaatttttatgactgttcagtacagcccaggaatcagagaaacaaatgctgttaaacattcatgtgttaattattgccattccttgctattcctaccatccaagagctgattatgagcagagggtatctttgcaacgagaattctggcttattgtggcccctccccaggggcctctttggctgttagatttgggggagggtcattaataaatgcattgtagtcacagggtaataatcctgttgtgattagaagtatagctgttctacttgaagaaacactgtccaggcagaaaggaatgaacaaggatacgggacagaaagacagggtcagtggggaagcatgaaaatcactcgcgaattcattcttgtgtctgcacctgcagaacatacgctctttggccagtgtttgtcacagctacaccatgctctagcatttactcagaggaatacctggtccagtggttaactgggaggttgtattaattagtatgcctaactatgtccaacacacgaggagctggaaggatagtttggtgaatggccacctgggattaatcacccagtccagtacagtcgtattaatttggtgcccagcaatgttcagcacacaaggagcctcaggagggacagtttggagagagaccacgagagggcggcagtgagcccacagtctggctgatccccttacccacggacagggcccctcttggggctatgaagggtggaggagcaagtgagcggccccaaagcttaaaactttatttgcttcacagcaaatgtatccctgggcctcacctgtgttcctgtcttggagttctgagatagcagggagttctgtttctgggaatctgcctcttccccagggggaaatgacaaagggtattttgaaattgacattcaggccctggggttaagcctgtggaaccagcaggctaggggatgcttgcctcacctgcctgggtgtgtgggtgctggaatcatgttggactactttggaaaagcaaaaacttcgaagagaaggtactgatgttggcattgctggcttatggcagccaggagtctgaataataataattattattattatttcataacaggcaggcaggaattctacagacaaggttcaataacctcaaggcagtctcgtggcgaactggcagattaggtctcgggacttgggactcaggctgggctgggtccacacagcactttgcctcttgcgggagaagtagcaaataaaggcctctggagctgggtaagcaggggctcaacactgtcgtcggccaaggggtatcttttgaaggatgcaaattagctgaaattgaatgaattatttggctctgcagggggaggtgggaggtaaagagggcccctggataatgcgcctgccactcggggccagccttgctgacagttattcactctgagtgtggcacacagggacacaagaggtacagcagccatggtgactgtagggcagggatggcccagttctgatgcggccaacgcccccgaagtcctggagacagaagtagccacatgaccaaggagtcagtctctcccagtgggtacacagagcagggtgcacagcccagctggggtcccgtgagagcctgctgagagtctggcagagatgggcaaggaagatgttggatccgactggcagagctggagggactgttgagaatcttctagtctacagtgcgggtggatttgagttctgggaggggaaggaattgctcaagtcacgtaacctgatggcactgctaggactggagcccagcattcatgccccacggtcatcatctaccctcaaaggccataccttgcaaaacctcatccccgctcctcagaaccctgatgtggggcctctgaagacacctgacaagaggggacccaggctgttcctctgggtgtgcatggcaggcaggccccttcccccatcacctggcacctaggcgggcagggaggccctctggcaactgcgggcagtgtggttcagccagggctagggggccctctgctgggcagccgctgcctggcctatgggatagctgagcaaagccagctggctgggtgggttccggggctgcatagaggagcatcctgtcaggaagggtcagggatggcaaaattctgacccatggcacttctttgtcagtccccccactccttcctgtcactgctgtccctaccaggcagccttgtgccctctgctcagtaccccctcgtgggctccccaccagccccccaaacctccagtcctatctgctccccattctagctcctgctaatatgatattgaatcttaaagggtcaatgaattatttcccccgttcctgaaggcctacatttgcagagcattcggactcctctgagaaaccgagtcttccctgcaggagtgagctgaaggcccaccggctcctgctgtgggctgaggcccacctgtggggggccctgaggtgtctttgtaggggcagcggcttggcagtagttctgaccatggttggaatcctgcccctttctagttctttgactttgagcaactcactaaacttctctgaccctctgtttcctcatctgtgaaataggaacagtaattcccgtctcccagaattgccttgggtgctaagtgagaggacgcagtaaagagtccctcacaggactcagtgactatcagtttctttcattgagattttcagttttctcatctgtggaataagaattcttgtctgccctagattataactttgaaaatccaagtgttttgaaaatccaagtgttagttttatttgcggtgccatgaattcccacaagaacagacacacgagagcgccacctccagtgcagacacagacactgaagccgtgtggcatcgcaatatccctgaaaactgcctcccgctctgcaccgtgcagtcctggggctgcccagaacaaaggccagggcaacccctggctccccctaccccacccaccgcaagcccaagagagatcagcacatgatcaagccaggttgcaggaaggaaagtgatctacacagcaagtgggtgacaagaagtgtcaggacacccatcttctgagctgggcctcaatcttctttttgcagattcttctgtcttaaggaaaagacccttctcttttctcttcgttctgtgatgaaggaccctagttctgaggtcaaattccagcaatggactcactgtctttgtcatcttggtaaagtactcagcccctctgaaactttgtttcttgatttctaaaatgaggatcacaaagccatctttattttttatgtatttactttttgagatggagtctcactctgttgcccaggctggagtgcagtgacaccatctgggctcactgcaacctcctactcccagatttaagcaattctcgtgcctcagcctcccgagtagctggaattacaggcacctaccaccacatccagctaattgttttgtatttatagtagagatggagtttcaccatattgcccaggctagtctcgaactcctggcctcaagtgatccacccaccgggactcccaaagtactgggattgcaggcgtgaaccactgtgcccggctaggatcataaaacctcctgcagagggttgcttagaggtttaagtagcataatgcattcctggctcctagcacagggcttggcttctggcaggttccccttcccatgtgaacactgactcagaaaatgacactttcccgttgttataaataatctcgaagacacccagttctgtgctctgtctctgtgcttggaaaggccctctgtgctcactctaccaactagtcatctactcacggctgatgtagctccagggaggggaagctcacccttcactgggctgcaatctcagaacagctgggacggaggggaagttcctgctctcatgatgtaagtgctgtctccatgcagttctcatccatagcatagcctcaggaaattgatctaatcttgctctaaatcaactcttcggatgacccctgggccttcttgtctctttcagtcatacactcaggggtcagcctcaaccttctccagctcctctcagctttgagcaggtatctttcactttcaggagcaactcagcatgcccctgggccaatgctggtgtcctagtctggctgggctcaggagtttctctcaccatccccaggctcagcctctgagattctgcccagttcttgctaatccctgcctccaaattctttgccctccagtcagaatgtgctgatataccgttgttgggttccttatatagagacactgtgcatagaatcccctttttagccttcccagtacatcgtcagggtaagtattattattcccatttcacagaggaggaaatgaagcctctgagagattggctgacttgcccaagattgcatagccagcaaattgtgaaccagaagtgggagcttggtctctttgattggagttgagagaatgagttctccccatacaggtatgatggaaatgagaatttatgtaaaacaagaaaggtggtcttttaccagtattgtttctgtatgttctgggtgaagtgtagactcattcggaggtgtgcactgggagggggtgtcacagcttgttaggtgtatatgcatatggctaacgaggatggtggggaggtgctggcttggtgtggcagcttagctgagttgggtcatgctgctgctcacgagaatgaggtccccagtttgagtccctccacctccatccactcacctgcctcccaagtgttatttatttgtttgtttatttagagacagggtctcattatgttgcccagactggccttgaactcttgtcctcaagtgatcctcctgcctcagcctcccaagtagtagagactacaggtgcacattacagcgctgggcttcctcccagatgtatttaacttagtcataagtgagtccagctgagagtgtagacagtgcctagggagcccagcagctcccttgggaatgtgattccagggcacaggaaaggccaaaggtccttgtgaccctcaaagtctatcttcattatacctacaatatgaatcccagtctcttctgttcccccatcaccgatacctgtgtcattcctgtctctgtgctcttattcttgacgttccctctacttgggctgccttcccctcactgagtcctgtagtcagcctcagtcatgtgcatggaacaggagggcatgctggctgagttgtgtgcctacatggctagactgcgcaacacttcctagcattccctgccaccaggtctttctgagtagggcggacacgagagagtcatgtgggaggtgtggagggcagagtgaagcagcccctttgtagctcacatatcttgtcgcttagctgctggctgtttgtgtgaggctaccactccaccaccccttggaaatatctacagcttctctgcctcctggccagatgagtgagctttgttctgtgatgaaggaccctatcttctgcaggaaaccctcaccgtcaaggtcagagcaataaaactgacaggggtcttagtccaacctggtgtaattccagctcgggctcacgggttctggcttatccttgttatccctcactttatctccatcttcccctccctacctcctgccttgcagacatggagatccagcatcaaatgcaaatacctctgcattacctagacggactgaccagctcccacaatagcagaaggtcaagtgtctgtaacaaatcccttattatttatgtatcttagcagctttgcttttcttactgagcttgaattgtggtatcaacatgggtggtggctgatggtggcctatgactcctatccatcctttggagcccagctcaagactcacctcctccaggaagctttcccagaccccactagtcatcagtggtcacttctgactgagctattacagcatttactgcctgtcctgctttaggctgtaagttatctttccactcgtgggtatcttcttgtcctaggtcaaaatttcctgcacttcacagatacaaatctctagtctcttcctgaagattctgattctgcgagccttcacctagaataatatggtgaccaaaaagtgtgaggaattcagccccaagtaaactgtgagccctaagatgacaggaaccaagtccctgttttatgtgtcagggacttcacatatccagcaaaaatagtagatttgaaagtggagggtacccaaccagccttttctggagcaacatcctgtcttagaattcccattaagtgagatctctcagacgcttttctttcttcttgcagggcagcagaggatgaaaccccaagcagtcaggtgctggggacgtcattcatcctgatgatcctgatggggttaattcttactagtcatgtctccctcactctgatcaagccaccctaggactccttctcttctattgctttggaaggaggactgttctttctggctccaggagtccacctcccaatctcccagcatgtcccccggagctgagtctgacagatccaggctcttctgctttttctttggggctttctctccacttgtttctcttatacgttctagctcaaacctatgcccaacacagagtaggcactcactaagaatgggtgctggattgttcatcatcagggccaggttgcctttgctgccctcatcaggcccttatacagccagggcattggtggtactctgggcaggctatgagaccctgcttgcctagcatctgagagatggaaagtccgccaaccagacctgggctgcccaccccttctcctcccctccccagaaaaccccagattccccactgtaaacagttctgtgactgtgtctcctggaaaggccagatctgatgtccatgcaggaagctttgtaagaattcctcatggtcgaatgcatctgttccctaatcaaaacacaggcagattcctcatgctgggccttaatttgctgaacttgcacataattgagacagattatctctattttccagctagtcattttatatttcgggggtgatgctgggctggctcaggatgtttctggtcggagcccccatctgctacctgtgcaggagggctgggcgccctgtgtgcctacttccttctatgatctaacaatagagaatgcatgtggatgcctggtgcaggaaggaaggagaaatactgttcttcttcagatgtgtgtgccagggaggaggagatggacagtagggtgcactgtccagtgggcagatctaaggaaagagaatttcttacctgagtcttcaaggaaagccagaatcagggccctaaacccattcaaagaccaagcaacagctaaaggctttatgttccacactggactctcagaagtagctgaaaccaagtgactcttaccagaaaccaactctggagtagttgccttgctcgaagcctaatcaactctgggctgagaagaaaggaacacacgtggttcctttcccttccacatgaggattaaatgagatacatcagggtggcagaggagagtgctccagtgggtgaaaaatgaccaggagtggggtgttgtgtgtcccactttatggaaatcatacttggaaaaactgaatcaaaaacaacaaactctgacaaagagggtcatcgtgaacaatgggaatatcaggaatatccctttaaagagaaccccctgacacatgcatggtatctgtgggcttaccagagttgcatttacacactcattttagggacatgtgcctaaaatgaagtacatctgttaatcagggtacagagaggctgtgtggtgagggggaaagaactggatagggggtcatggagcctggttctgccactttctcactgagagacctggagcaaatcactgtcccaatccaggcctctgactcccattggacagagggtaggactggattagatgatctttaaggccactttcgctttgacattttctgtaggaagaggaggaagaagatggaacttcatggaggccctactgtattgcagatgctcatttgacccaatgccttggtaaccccaagaagaagtcatgctcaaacaattaagcaatgcatccaaggtgagaaggtgtcagggccagtaagtgtcattaccacgccctcgtaggaggtggcagggaggattcaaacctgggcctggctgacccgtgtatgtggtaggtgtgtgtgtgtgtgtgtggtttccagctgtgatcctataggacaggtgaggcagggagccagtggacttgcagtactgcttctgttttaaattgagacaaagcttggggccatcacatgggcttcctgtggggaaaaagggaggccaatccatttaattaacaccccaccagacccctggaactctccctccagccagagcaccaacaaccctgatagcaactgggctgccccaccacaaacctttaagcaattcattttctacacttataataaataagtcaatgaaaaaaattttcgacataatttccccagagaatggaagaaagaagcagcatgaattggaagctcctattatcttctgttgtcttgtctctgatgacagataatggcggctggtgaaggggattggttggcagggagaataatgcttgggtaaaggtggcctttagaatatatcatcccgcatccaactcaaaaagggaagaaaaaagcaaaagacaaggcaaggctagccgtgctgctctgttcaggcctcccttccatctacatctagccaagttgcagcccctcttactattagaaaccattgcatgaatcaccctatttgctgctgcttttcccctgtgccttcagagagctgattaattggtccaataccagcaactcgtcacgaaggtcttaattaagaaagaaatagccaccttgtgaattccctgggcatcaatagccctggggatgtctcttctgcctttctgcctgctgctcagggaatggtgaggaaaagaggacagaggcaggctccgattcaatgggattacaatattggagggagtaagagagccaagtggccaggaaactccaggacagttcaggaggaaagaataatagagagtttggccaaatgagtcagcttccaaggctgaatccaactggctgggggctcccacaaggggagtgaactttggggacatcttgggtttggactaaatttttaagactagctttaaaaaggacagttaaaagtatagcaattattttcaaccctgactgccctgtaggggagcttttaaaatacagtgatgcccgagccccacttcactccagtccaatcagaatctccagggggtaggaaccaaacactgatgtattttaagagctccctggctgattctgtggtacacctggggctgagaaccaccaaggatggtacagagcgcgtttcttcatgtgtgctccctgggccagcggcatcagcatcaacatcacctgggagcttgtcagaactgcagaatctcagacaccaccccagaactactcaagtagaatctgcaagacccctagctcattctcattcacttccaagtttgagaagcaatagtttagacaacagattgtttggggttttatttggactccagcattgaggcacattactcaacttccctgaaactcagtttcactgtatgtaaaatgggactaatgatatgtatatgccacagttatcaagagaagaagacagaatcatttctgcaaagcatttaacacagtgcttagaacagtcacttctcaatagacacacgtggttcctttcccttccacatgaggattaaatgagatacatcatgtaaggcatttaatagagtgcttgcttgtactgtgtgcttaataaatgtgggctattcttatttcctcaagcattccctaggcagacagcgggactcctgcctttgtgctcctccggctcgctactcatccatctcttccagcccttggagtattgaatttcaataagccatttttatgtctctcaaccccgctgggtcttattcagctcacttcccttggcctagtacaaagtaggtccaggaaatacatgaataaatgcgaaggccataaagcgttccttagctggagaacagagaggccgggggtcacgtgcctggggcttccaagtccttagatgtcctgtttcttggcccttgtgtaagaacgaggctctctgaaggagaaaggggccccttccagtgtctgtgagtagaaagcaggtagcaaaatatgtcatggaatattctgtgtgttgggtcaatttcaaccaacacagaacctaaatgctttgtagacctaattaaactgggagcttctagaaaaataaaaccgactttgagattgtctctagacttcctttattcctagcatgcttgggctggaaaaagaaaaagagagagaggtcagtcccctttgtctgttatgccccatggcaagcaaggggaagtcttggcagatggcagcaaggccttcctaattcatgggtcaccctggagctgcccacagacactgccagaccttttaatgaaaccacttaattggcatgaacataggcgagtgtacaggtcacctttgctcaggtcaggggctcagatgggagcatgaggccttttgggcctgcactaagcccttttttcaaggagactgtgttgctgccaggctcaagagagaggtggttggaacctaaaatactgataaacagctcatagtcctgcctagggagacagaggtaggccagctttgccaggtcatgcaggaccaacctcacaggtaccaaggggttggagactgcctctcatagctttgataaaagtcaatcatttctattagtttatgcattcactcatttaacaaaaggttttcgagttcctgctctgtgttaggtatataaagtgcttttctgtacattgttccatttgatttcatttaattagacaagaacttgctgagttagctactatcttcccattttaccagtagataagcagagccttaaataagttaaagaaaaaaatatttaacttaaaaatttttatttattaaaaattaattactaatttttaacttaatttattaacttattgactaacttagctcaaaatcacacagcttgaaggtttgaaccctagactctgtgattcaggcctcgatcagtagaaagagtttacaggcatggcctcctggacctttaaggcaaacgttccagaaaggcttaggacaagatcatagaactcctggcagaaccaggtgccaccaagaaggagtgtgctttgtttctgtagtcttggggtacataaagctgggcagggggcagggggcagtgggtgggggttacaccaaatctgagctgcctttatctgtaccgacctgacatcttgagcagaccaagccccaggcagtaaaagtgctggaaagtcaagacacgtgggcctcaatcctctctgcttcttgagaggcgttcgaccttgcagaggcccttgctcttgccatctgggggtttagggccagatggctgcccaggtctcttagaattaggttggcctgattccttgagctgtggggttggtgttcctggagtcactgctaaaaattctgcaaattgcagggaagccaatgtttaaagacttctccatcgcacttgtggttgcatacatccacacacctcccagtgggtcacgacttcctagggcttatcccactgccaaggagagaggcccttctttcctccatcctctacgtccccaactcccagcttctttttctatcacctggggggtgcccataatctgtctcaagtttctgatggtgaggtgctcgaggttgggaagcgtttccctgactgtctcgtgagcagaaatgatcacactgtgttcccagccctttgttctccccttagcctcccactcggttttccaggtgaggtcaagggccacatggaaagggaaaaggtattataatggaagggatgcccaagaggagtgtgtatgggaagggttgagcgatcatactggacactttcaggtcttttttattggccatctgtcctccactttcttcttgcttccagggaggtgggtctgtgtctgtggctggatgcagtgagaggagccagaaccaacacccagtctgttcttcagccagaggggtgaggctgagtccactaagctggcacctccacggtttgccctcggcaagcgcctgatgcctaaccaacctcacccatgaagtcaagggtcattcatcaaacccattttcctaagcatctcctacatatcaggcactgtgccaggctgtgggaatgcatgatccacatggtccctgctcacagaatttacaatcttgtgctagaaactattaaactaataatgacacaaataattataaaataaaattgcaggaagtctgcatgtgtcagctcctgaccttccttctacttccaggactgggtttgattaaaagtgaggctactatgatgggccactagaagatctgggaggtgaaatccagtcccaaatctcctctcacccactgactcttgggacagcagagcaagtgaataggaaagaaaaagaaagaagatgctgtaaaaaggtggcttggagctggcaggtgctagtgcaatggatgggggaaaccatataatctgtcatttccatctcttccacgtcactgacattggtcctcttgaccctgtctcagctcagacctgcatcatcttttcacgagatgattgtggcagccttctgccgccagtcttgcctctcacccagcccaagatagcctcgatagaatcgatacaagtctgcagagaacctctcctctttctgcctagagcagtatttctcagccttgggactggtggcaatttggggctagataactctttgttggctggggctctcctgtgcattgtaggatgtttaacaacatccttattagtagtgacaaccaaaaatacgtccaaagattgccatatgccatatgatttgggaaccactggctcagagatattatgcccttgaacttgatattcaaagctctccatgatctgattctaagctgtatttcaggccgagtgcagtggctcatgccttaatcccagcactttgggaggctgaggcaggcagattgcctgaggtcaggagttcaagaccagcctggccaacatggtgaaaccccatctctactaaaaatacaaaaattagcctggtgtggtgccacatgcctgtaatcccagctactagggaggctgaggcaggagaatcgcttgaactcaggaggcagaggtggcagtgagccaaaaagagtaaagaaagaaagagcgaaagaaagaaagaaagaaagaaagaaagaaaaaataagctttgtttcagtatgctcttcctctgtcctgtctctcacattctattatgtagccataatcaagtatatgaaattttcttaaagtgccctacctttttcttcttgcctttggccatcctgttctcttgacttacagggccatgacatcttctctatctattaaaagaaatctacttgtgtcacaagattcaaataaaaggccttgtctgagaagcttttccagatttctggcatttagttatcttacctgtcaaataaggataaaaagtctgccccatggattgcctggaatcaaaatttcagagttgtaggagacctggggaatcaccaatgtcttctttcagggagatagacagaaatgcaaagaagtggattgtcttgcggaagtcatagccggatggaagataagctgcacctagaacttggtgttctaaattccgagatcaatattctaaacccacttgtcagcttttgcaagatgaagacactatctaatcaacaggaaagttaactttgtggccacaaggtcacaaaaactctctgcacctcaatgtttctctgtaaggtgaagggctaaaccagctgttccccaaaaatcattccaggatgctttgtgctactatgcttctaattttcttttgagaagattgtcatttaatcataagctattcttacggggaggtattcataatacttcccagtccatctcattgtgggggctggaaatttctgcccttgctacgatgctgtcaaaattgaaccccagagctcagctcccaagaaggttaacataatggttttgctactcatcgtaacaacacctcacatcatgccttcagatcactccccagcatcattcttcaaattcaaacgcgaaccagaagtgacaaatgattcttgtaatgcgctctttgacacaaatcatttctgattgctcgggaccccagacaaccttgagcatgcagaatcaagctgagagggagaagtcttagaaaatgaacagcttcaacttcttgccgatgagaaccctctctctgctcacgaggcaggagcagtatgtgctgattgccaaacagatcatttttaaaatgatgcagatctgtgggggattggtccgtgtggtgatgtgtctcatcttacaatgtcctatgcagccttcaaagcgtttttagatcctggcaaggaaacagacattcatgtgcgtagggtttgcaaggcctctgcatatgatgttgctcttcatcctcccagcaagcttgggtatgtattgttatccatcaccccataaaggaggaaagggagcctcaaagaattcctagaacattgccaaatgacctaacgtgttgctgttagatcttagactagaattcaggtcctgtggctccaaagccagtgctctataccgaggggcacctctaagctataaatccctttcaaagtgctcttactatttggcctcattctctgtgtatgaatgcttagaattgagagaagaagtgcacattgatgtgaggggggcttatctggaaaatcaggaggttggaatggatcacaaataatactcctggttcaaatgcattggcagaccagtctaagtgccttatgagtatcatttcctttgctttccttagcagcgcagaaatcctgtggggtaagtattaggattgttcccatttttcagagatggaactgagactcacagtagttaagcaacttgctcaaggcagagctggggtggggccagaggcagagatgaatggccatccatcaaggattcctgctcccttgcaaagactgaatctgtgtagggaagtggttgcctggccaaaacctgcatttctcaggttgcctgcattagaagaggccatgttgaccagttcttagcaatggatatggtgggaataaaaatgtcgcttcttttttttttttttttgagatggagtatcactcagtcgcccaggccggagtgcagtggtgcgatctcggctcactgcaagctctgcctcccaggttcatgccattctcctgcctcagcctcccgagtagctgggactacaggcgcctgccaccatgcccggctaaggtttttttttgtatttttagtagagacgggtttcatcgtgttagccaggatggtctcaatctcctgccctcatgatctgcccgtctcggcctcccagagtgctgggattacaggcgtgagccactgtgcctggccccaaaaatgtcacttcttagtggaagtggttatgaagctgatgtgccttctcctctctctatcgcctcctgccaatagacattaatcccttgactgacttcagaagccatgtgtggtgttgaaatcttacaaacttattctgaaatgcttccaaaaagcagaacaaagaaagataaaattgaaattaaaaaataaaaaagaagtcgtgtatggaggaggacagtgtccatcagcatggatccctgaatgaccacgtgaaacagagttcccacctctactccagcctccccacacactgctaattgcacgatgcataaaagagacatcaacttaaattggactaagtcgttgagatttcaggaggtatttgatatagcagccagccttatcctgactaatacagaagagtcttgtttccgaggtgcattctcttcactgctgcaccacaaagtggcctcgggattgtttagatttatggagatagtagaaaatgttctccttattccctagcccaagagcaaaagtgtgttggtatttttttccacctgtgaaggctggggagtatacgggagtgacgttcatgtgcttctgagccgcttccaaaattgaccactcccttcagtcttctcatctcagtaaatggcactagcatatactcaatggcttggcagtcattttggatttctgtctttcctttgcccccacatcctaactttcaacaagtcctgtagactctacctcaaaaataaattcagtgggtgctggaactggctcaagccaacttgtgagagccgactgtcaaattgttagaaatattggaagacagttgatgtcatattgaaagttttaggcggcccatggtggaggtatttgcactatggaaattgacaaatgctacaaaataaggtcaccctgctcccaacagagcagattgttaaatgcctaccgacacatccactgaatattttccaagtttcaccttttcttaccacttgcactgctaccacccaagtcatagccactagcatctcaccttatcttgcatatatgactgtagtaggctcctaactggtcttcctgtaattttctgctctttcccagttaactcctcacacagtagccaaagtgatcttttaaaagtgtaagtgaggccaggtgcagtggctcatgcctgtaatcccagcactttgggaggcctaggcaggtggattacttgagccaaggagttcaagtccaacctgggcaacatggtaaaaccctgtctctacaaaaaattagccaggtgtggtagcactcacctgtagttccagctacttggggcagggggaggggtgctgaggtggaggaatcacccgagcctggggatattgaggctacaatgagccatgatcatgccactgcactccagcttgggcaacagagcgagaccttgtctcaaaaaaataaataaaaatgtaagtgacaccacatcacttccctgcccaaacctctctgggccttcccattgcccttagagtaaaattaaaatttctttttgtagtttacagaactttacacatctggcatctgcccacctttctgactcagcctctgccactcctctctcactcatcggtctgcagctggggtggtggtgtatctgttccaccaacatagcttgttctggtgtcagggtctctgtgtttgctgatccctttgcctcaaatgctcttccccttgatcttcatataatttgctgttttacatcatataggtctctgctaaaatatcacctcctcctagaggccttccttgagctatctaaaatagtcacctcccgcccaccctgccacagcacgtgcttcctgaagttatgttatgcatgtgttcacttgtttacaagtgaaatctgctgcttctactgaaatgcactttgtgagggtgggaatctttctttgttcactgtattctcagtgcacgaactggtgtctggcaccagaagatgctcaatatgcctactgctaaatggacaaacacatacctgatcttcaatatgacatgattgaatgtagccaagtcaagtcagcagatgctcagatcataatgtgggtggaggttctggaaggcagggcctgcaagatagttggaaagttggatgggctgactatgtccaaggaccacagggcaaagggggaaaccaagggaagaatgaaaacagaacagaaagtttgatagggtacctggagggagagtgtacgccgagcctcaggtcagtatctgtcaatgaagcgtcagagtgtgtgtctaggaggggcaataggaacaggatctagatagatttagcctaaagcctctttgttagggcaccagagaaagctaatccctatctataactttttcactacgtgacttcgggcaagttacttaacctctctgattctcagttttctctgtagaaaagggttaatgatatcctcctatggctggtgggagcactaaaggaatagaagattaaaagtcttgagtaaaatgcttggcatgcagtaagtgttcaataaatgcttagtaactgcaaatttccatactctttttaaccttcctgcctgtaaatgatcactctttttattgtctatatcctttagttggaccttagagacaggagaagcagggtatggaagctaaacaggacttagaggtgaaaatggtgaatgattaggtctcatcgcatacccctgtaggcagagttgggatggctaatgagaagaggttaggaggtatcaaaggctccatacagacacggccagtgggaggaccttgggacagtcctcattccccatggcatccacaatgggatccccaatttgttctctgaagtggcatcttctacctggaggccttttttattgagacttacagcatggaggagaacaccaagaaggactgagagggatgcagtggggacttaccaaggtcacaaggccagtgcttggcaaagccgggatagaaacccagttcctctgactcagcccagcactgtctattccaccttctactctgtatcacctcatgtaggagctgcttttccaaaggggcatcagctgctccagagcatgatctgttatcccctctttgtatatccacattaacagttgttcaaccaatgcctgtggaatggaattaattcaagggcaggttttttctacaaggtagatccatgctctcttttgaagaggcatgcccatggcatgaggctgtgaggatgagatacttggaggctcaggtagatttagaaatagaacagtgaaatttgagtttagtaatgaatacttactaggaataggataacaatcttctaaatctataaagtgcattttagcccataaaacccattcagactctcattttcccccacttctcccagcaagcaagtctgtgggtggactcagaagaggttaatgtcccatttgcagttgaagagactgaggcacagacagggaacacaatcgcctctgatgagccacgtggccttaggctagagtctgagaaagggtgactattggctactgtagtacacactcctatcacctgcagatggagcctgcagtgcccccaaagaggttaatttctcactagcagattctttctcagacatccagcaggtgacttgcattttaatggaccccagatgcttattgcttgcaaagaggtcaagtttctaaatgggcagccagatggagagcccttctggactttccctggtgtcaatcaaggctgcgcctgccattggcgcctgcttttcttgccctacaatggtgctagcaccttccatgctaacagcttcctccttctgagcccctttcagggctcaaggctggattccaaggtggagggcaggaaagctggaagcataggcagggcagctccaaatgcaaagatctgaagacccaaatgcacattctttcctgtttgccagggaaacatgtagacaactttaacattcaatgccttgtagaagtgcaaccatcgtgcatcaccacatatacagtacagacaccaataattaaaacccagcccctgtgcctggggcctcatggctcgtgcagcacgttcacaattgctctctcatttgattctcataggaagctcagctcaatccttgactagctcgggtatttactggctgccaactgtgccaggtgctgaccttcgggagctcacagtccagatgggagacaggcacatagcagggaattacatgggagagtgcagggaacaacatgagacccatgcagtgtcatgggaatgagtgacaagggacttctgtcgaaaaggtgctatccaggctgaggagttagccaggtgaaggggcagggacagcggagtgttccgggccaagaaacagcatttgtaagagcctaggactgaaagaactcagcacttgtgttcatttccttgggctgccataacaaagtaccccaggttgggcaccttcaacaacagacagggattgtctcacagttcgggaggctggaatgccaatatcgaggtgtcggtagagttggtttttctgcagcctctgagggagcatctgttccaggcctctcttctagcttttggtagctccaggtgttccttgggttgtggatgtcattttctgtgtatcttcacatcctcttccctctgtacatgtctgtctctataaccatatttcccccttttctctaatgacacaaatcatattgaattaggattcactctaatgacctcattttaatttgaccatcagctaagatcctatttccaaataagctcacactcagcataggtagtaggagttaggacttcaatatattttggaggggggcacaattcaactcatcacagcacttcccaaagaatgggaggtggcataaagattgagggggaggacaacaaggggaggtcaggctagctggtctacctggaccctcttagggagggttcatcagccatgatgaagactttgcaatttattataagggcaaggagtgacccattttcgctgccctcacatagagttagttagtcactcctgtgagttcttggactcactcctgtgagtctctcaagagtactttcctaggtgggcgggtataggtttccctacttgatggtgcattcactgagcatagggaccaggtcttccaagtcttattattcactgggacctaccagcacagagatcagcacacaggacacgcttaataagtgtttatgaatctaacacatttaggtcagttattgcatcagctgaatgaagagctgtcccttcatttatatgtgcttttcacacatttcacatcgttgttgcaatagacacaatcccttttgcacatcttcatgtatattcttgatttctcaggttgaaatgttattttcatcttcttaaaaagagaatccttcattacattcgcccagactcctgtgtcttatgtggtttacaaaagagatctgactgggcatgttgtttttttttcttagggaaaaaaaatcaatgacttatttgtgtgtctttaatgtagagggaagtagtagaattggttttgccatcttaaggttgacaagtttaatacttaagacagggtttattcaatcccaacattgttagagcttgtaaaagtttaatgatctacttctaggatttaagatttgactgagtctctctctctctcttaaattttactccgacaggtttgctctgagaaaagcaggattttgtagccctggccccaatctttggacttctgcaaaacgggagatcagaaaccccacaatgtcccccccgaacagagtgattgagtggctgataaatctgtggacatgtgaaaatgaagtgcagcttgctatattatagcatccaaactgcaggggagccaacaaacatctaactctgcccactcattttaccactggggcgaacgaggttcagggaggagcagggactcacctgagcccaggaatagggaggctcaacggaaactcaggccattgttgcaaagcacatcctatctgcagtaaggtgaggactgtatcattagggcttccactttctcaggactttggagatttctggctccccagaagcctcatggaaaggagtgagccaccttcatgcatttacctactcccagagactctaatgcaagtgccccttcccaagcagccacttctcaagcacatcactactacaggtactccatctccaggtgtggatcccaggtgctctgcttccatgcatccttcacctggtttcccaggtcctttgcttggtctagtgcagggttaagacccactggacaagagtttgggagctctgcccttacaagctgtgatcttaggcaagcttctttatctctctaagtttgtttcctcatcaatttcatgggaataatgaaagtttctatctcataaggttctaacaaagacaacaagaccaatgaatgcaaaatgctgaatacactctctgttgtatacttaaatacttgactcctttggttgtgtgtgtagattccaattagtgggaagcaaaagtcacttcaaatcaatcttcattgttggacatttgggttggttccaagtctttgctattgtgaataatgccgcaataaacatacgtgtgcacgtgtctttatagcagcatgatttatagtcatttgggtatatacccagtaatgggatggctgggtcaaatggtatttctagttctagatccctgaggaatcgccacactgacttccacaatggttgaactagtttacagtcccaccaacagtgtaaaagtgttcctatttctccacatcctctccagcacctgttgtttcctgactttttaatgattgccattctaactggtgtgagatggtatctcatagtggttttgatttgcatttctctgatggctagtgatgatgagcattttttcatgtgttttttggctgcataaatgtcttcttttgagaagtgtctgttcatgtccttcacccactttttgatggggttgtttgtttttttcttgtaaatttgtttgagttcattgtagattctggatattagccctttgtcagatgagtaggttgcgaaaattttctcccattttgtaggttgcctgttcactctgatggtagtttcttttgctgtgcagaagctctttagtttaattagatcccatttgtcaattttgtcttttgttgccattgcttttggtgttttggacatgaagtccttgcccatgcctatgtcctgaatggtaatgcctaggttttcttctagggtttttatggttttaggtctaacgtttaaatctttaatccatcttgaattaagaaaatgtggcacatatacaccatggaatactatgcagccataaaaaatgatgagttcatgtcctttgtagggacatggatgaaattggaaaccatcattctcagtaaactatcgcaagaacaaaaaaccaaacaccgcatattctcacttataggtgggaattgaacaatgagatcacatggacacaggaaggggaatatcacactctggggactgtggtggggtggggggaggggggagggatagcattgggagatatacctaatgctagatgacgagttagtgggtgcagtgcaccagcatggcacatgtatacatatgtaactaacctgcacaatgtgcacacgtaccctaaaacttaaagtataataaaacaaaacaaaaacaaaaaaaacaaatcaatcttcagtttgtgtgccagggacagtgcccagactcccaagtgtctttggggcctctatgcaaaataactttcacccagtactctctccctttcatgtgagaggtagtgtcagaagtaacagtgaaagcttgaaagtacagactgtaaatggctcaagttgcatctccctggagcccctatttcaacatagttttgaccagaatgttggtttcagctgcaagcaattgattggcctatacaattctgtcatcccaacaactgattaattcatcagtaatgaaactgtctgtggtccctgctagcatgcgagctaccattatcgagcatttattctttgtcaagttccccaagtactttacgtacattacctcgcttagtactctcaataaagtcttattacacaagccttgttattctgctctaagcatgaggagcctgggaggtcagttcagagaggttaaggaagctgcccagggcacagagctagtaaacggaaaagctgggatttgaaccccagtctgtttcagtctttcagccacatttttaaataggcttacaggggaataatttatatacagtaaagtttacattttttgagaagagagtacagtacattttgagaaagtatacagttgcataagcaccatacagtaaagctagagaacctttccctaacccaggaattcccttttggccctttgcagtcaatctgttcctttcaaccccaacccctgggagcctgcagtcaatgatttgttttctgtgactatgcttttggccttttctagggtgatgtatgaatggaatcttgtagtttgtagtcttttgtatttgacttctttcccttatcagaatggttttgagattcatccatgtggtcgcctgtgtcaccagtctgttccttttcagtgctgagtagtagaccattgtgtgaataaggtataccccactttgttcgtccacgcaccagctgatggacatttggattgtttttagtttgtggctattatgaatgaagctgctatgaacatttgtgtacaagtctttgtgtaacaaatgttttcatttctcctgggtaaatacccacgagtggaaattcctgggtctcaggttaagtgtatgtttaactttgcaagaacctactgaaccattttctaaactttctgtacctttttaaattctcatcagcattgcactgaaggttttgttcagctacatttaaaaatgttagactcaacatctacctcattctgagccgggaggttgagaataatgaatgctacatttcgttgactctaagatgccatcaattttaagatgcgccattattttacatactgctaagaaagaaaagcatttcacaaatgatgacacaatgcttttatatcacttagaaaaaattttgcatacttattaaaatagcccatatatcacccttatacatacataaaatggaaaatacaaatgaaaaaaaatataggtcgggtattcctagaatgtgtattcacctttagaatcttctgattttttttttgactccagtcctcagtatttatatttttgtcccccggagtttccctgtgtgccatcagcctgttgatggtgcagcatttttaaaagagtgctctgttactgtctccaagaattattttcaagaaaatctcagtgctgggaactgtcttacttgactacactcatattttacacccctctacccacccagttgaattatgtatcaccagaagttaagtagcttctgttcaaatttagtaaaatgatttttggcaaattgatatttgttgccttaaagatagccctactccatagataaatcagtcccaccagcctctattgctttacaatttcattaatccttttttaaagaaatatgacaatttatcctgccttcagtagctgttggttctatatgttaagcaatgcacataacccagctgaagttttgacaacattcatggctgtgagacccagtccacacatgtatgggctgtgatgacttccttgtgacttgctgtctgacagtgattgaaagacgtcttcatttgtaggagacagtctgatcttagggacattaaaattgaaaaaaattgtgcatcttagagctcattaaatgcagcatattttacccgagacgcggatttctactgtgctctatttttcaatatcccccaaattcccataatagacaagagaaacatctgcttcatttttggccacttctttctccccagccacctctaatcacaatgattctcctcttcttaaccacttctgtcaccttcattcaatgcccattctctttaccatagctattgcaaaaacctcctcacttctctaattgccttctagaaatttcttctccttcaatcagtcctatttattattcccagagtaatcttgctcctataaaaatccaaacatgtaattcttcttcctaaaactctttcttggatacttattatttaaagaataaagtacaacctccttagcatgacattcaatttattttacgttctgggtcctacattttgccccagcattattctccaccatttcccactccaggcacacccaactatttggtgttctccaaacgtgccttggactttcccttgctgggacttttccattctggaattctgtttatgcttttgtctagaattccttctcttccttgttcctattgaaggctgttcatagaaatgaagcataatgctcattctggttgtattagcatgatgcatttatgggtgaagttttctcatatatatgtgcatatatatatgtaaatatatatacacatatgtatatgtaaatatatatacataagtatatgtaaatatatatacatatgtatatgtatatatatgtagacacacacatatgcacaaatagacacaatcacatatattcatcttattcattcttagttgctatgtcctctatggaattttctttgtgctctttaattggattccttccttcatgttttctcaacacctgcttgtaccttcgattgcagcatcttttgctgtaaaatggagataggagaaatgcataggcctatttcaacaattaattcaattacatagactaagggtgctagaattttggaggcacccgagtatgatgaaagacatctagaacttggcatcaggcaatagtgagacaaagctgcagccctgtcactttctacctatgcgaccttgggcacataatgtaacctccttgacttgtgtttcctgaagttcctgagccaatgtgagccctccagacaccttgtagaaccccttctccatagagaagaaatgctgggaaaactgccaagtgccttcctgagtcctcatgggtagggcaattctgtccctcaagttacctcctccagcccttggttcatgttttgtggaagagatggggcttgaaacatttctctctcctcttacagattatatacgtgtagctggcacaggaccttgctagcacaggacctcactcccagctcctcctgcagctcaacatggccaggtgactggttctcactaaagcaacgtgagtggaagtgacaggtgctaccttggggtcaaggcttttaatttgcaagtacctctccaggctctcctatttcatctgctggctgagtgcagatgacaactaggacctaggctagtgcttctcaaacttgagggtgcatcagaaccacctggaaggcttgttaaaaaaggttgccaggccctacctccaatatttctgatctggtgtcccagagaggggcctgagcatgtgcatttctaacaagttccagggtgacgctgctgctgttgatataggaactacagtttgagaagcactgtcctaggagacagcacagacacaacatggaaagggcctgggtacctaatgaccatggatggggcagcagagggggtgggtcggtcaattgggtatattcatctgccactattaaatgatcaagaaataaacttttagtgagtttgagaatttatagattttggtgagtctatatgcattacagtgggttaatctatccttcaaagcactatcccagctattcatgaggctagagtccagacccattgaattgtccatttgctggctgtctttcctcctggtctggacccagctttggagtccctcataccctcccaggtatctgatcacaacagtctctgggccatcactcagagactgacagtcctaatctcctacaagccctcctgctctctgccattggacctatggatagtcgccccatcctgcagaagcctagagtgacctccaacccactggacttggtaatgaggacttttggcctctccctggctgggacaactcatcccccccatcctaattaattgtccctggttgctgccttcgccagcttctgcccatgctacacctgcatctgagaacccccagtccccttgcagaatgctagaatgctaggagacagaatgctagaccagtctccccacctcatacccagttcctcagttccagcactgcccaggcacacagtaggtctcaatgcctaaaagcaaaactgcagtgaccaattctgaggaagaggtcaggacaagaggaatgacagatggcagctgatacagccagccatcacagccaggcacaagatacaggttcagtgtcactccagcaaagttcttggagcttatcagaatgcagtctctcagacgttaacagggaaattgtgtgataattatatattaaaaagtttagcaagtattaagagatcactagttcaataagcatatgaaagctcaaagcaggattcatgccattaactcaaattacatgagccgagtctgctgtcgtctcccttttaagcagcacatcaaggaaaagaggtgctttcattggattattaaaaggatttaattaacatggaatacttcacaggaagacaacctatgacagaataattaaaatatagtttgttgaaatgcacattaattggctactaattatcacatttcgttcccctttatgggctaaagatacgctcaggaggagacatggctctgtgcagaagtacatttccttgcttgttccgctcagtgtttaattagaagaaaggacaaagtgcttcactctgcaattctagaaaactagattggaagtcagagcgagcaaatgaggggtattattgcacactggccatgcattgtagtgggagagagcattggactgggagtctacaggcctgggtgttcctctcctgctctactctccattcaccatgggtaattaccatgcttaaaacagttcacggctgcccttaccattgcataaattccaaatccctactatctggtcagttatggtcagacactcaactgtttttccaagattccccaccttgcccattccactctagccatgctgaccttgctgtaccttaagcaagtcaaggtcattaccaccacaggacctttacacttgccattttctcagcctggagtctctccccctgaagcttcatatgggacttcttcccgtcattcacaacttagttcaaatgacttctcagagggcttccctgactatctaatctagtgttgccttctttattctctatcacatcacagtgctttattttacccccagatgtaacaccatgggattatcttgagtatttatttgttcacttgttttgtctgtttcttgtattgtctgtttcctccacttgaacatatatgctatgaaggctggaactgtatgtttccttgatgcattgcagctccagcacctagaacagtgcccgggacatggcaggcatgcaataaatatttgttgattaaatgaataaaaatggcagtggagcaagaagacctctgaaggtccttttagcgcgaacactttaggatactttgaacatgcagagaaccaaaagagacataaaggctgcagaagacagggtgcatcttaactcgttttaggaaccccctactggccctcagcaaagctttgctgatgatgatctttcagaaagcatttgtggcttggggtccgtgcaagtctgcaattctagggttctcaagaatcatcaggattcctgaccatctctccttttcaaagctataatcatggggtcatcactttaaaaactcacctcctctcttaattttttcttacctgctttaacctgcttcatgggattctagcaagaccaagaccttcctttcaaggctcattttgcaaattagcctagattgtggctgacagatgctgcctatggctgttgagtgggcatgcttgtttttcaaatgaagagttcagatccttggcattatgaaagtactttcctgggttctaaatctacagtcctgttctttcctcctttagggaaatctgtgaaacataatggatgatagaccaggttttaaatcttcttccccaaaagaggtggtcatcctcctccctaatgcttctgcctgcctcactccatggtgcctggtcacttcttcctcctccacctcagtgacttgggtgacaatgggctttatcacctccctgccctttgtgaactattgccttctcatggggcggctaaacctagggacgctgagacagccttgagccagaggcctggaccagcttcacctccagcattttgccagatgctttctttggctctgtgtttctggtttttcatctcagagcaactccttatccgagcacagtggaaattcaaatttcagagttgtaggtgagagctgagataaatcaggccctccatgaggtccagtccagctcagtggagttctgcacagtcatttggggccagaggtccagatagtaataaagcattgctttgtctactctgtgaatatattgtagaaatagtttatggaggagtgcaaataccggaacgatctcaagcagtgttgttctaaagtcaacttttaaggcaatatctcctttgcaagtttgcaatcacagtaactgctgcggtctgctatgtgagtgctggtgggctctgctgggcgacaatgactggcaggcgatatcatgggaagaaagggctcacatgtgtgatgttaacagggcgggacaaatcacagtaaacagctgcagtgatgtcacaggaccctcatggttaattcacatactgggatagctcttgtttacattctgggacagtagcaactgctttaaagctctattgtgtagtagttaaacagcagaggctgaagagccagacactctaggtttggtcctgtctatatcacctactggctactactgggctttggtttcctcatttagagaagggataattgcatcccttgtaatctaatggagagaatattagcaagaggtatgatgagcccagagtggagaaaacaataactgctgagtaaagagattatggtttctagagaaggtacatttgcagtggccctctgtgcatgactaggagttttataagcaaaagaagctatggcaaggacaggagtataagcatagggaaagtgatagtagtgatggtggagaggagactacattttaggtaggaaacagcttttgtgtgactgacctgtgaattgtagtggaacaagaacgtgaaaagatatgttgaagctctgggtgggcttaatgcaaagctaagaaatttggactttgttctgtgcaggatttcttttattttttctggatgatatttttatgcctagaaaataaataatatttatcttaagctcactgcagaaaacttgaataccaagaaagtgtaaagaaaaaacaatcatatgcaaacctactacacaaaataattgctgttaacatttggtcggatgtcttttcggtgctttttcgatgaatatgtatgctgatctagcattatgaaaatgttatctagggaatatttttgagcaggagagtgttgtgcaattaggtttgcattccggaaagattctggtggtggtggctgtggggaggagggctagatgaggttgcagccagaggtcaggacgctgttaggactcattctagtccaggggaggaatgatgagggcatgggccaaggcagcacctgtggggctgtggagaagtgacaccttcacaggaagagacaccaaagacaaaaaactgctaccttcgtcaagtcaaacttgaagtcaatggctgtaccaatgaccaatcaatggccactaagaatatcttctctaggattctggtctactcccaatcagatgcccatagcttggtcttccatcctagaaaatgctcttctccttgtgaataattagattatagacatccttcccctaggacccccagctctctccaaaaacttcactgtgcttccttcaaaactcagtaggagggatttttagactgttgttctgagatgccatagccatcaggatcccttcgatgtaaaagccagatattgtcctcacaagggaacttggcagcatggctcttctgactctgcaggtgcgatgccactcacctctctaacctcagccattgttctcctcccttccacatccctccccaaaccagctgccaccaagctgtgaccagaaaatgaaggttgtcacaaaggagcctgaggctgggtgtgagaaatgagatgtgttgtctgtgatgggggaagattgagaaactgaataattgggggcctgagaaccaggctcttcagacagtcgggatgggctcacagcatggaacacattaaaatctcattgcccaccgcttcccggtagcctctgctgcctcgcttcaagtgctgttttataagcagtgtttgcagagagttaacgaatttgaaggggccctgaaagggaaagggcctctgttgaataacttttctcttactagagaaaatgagagatggttttccttataacccaatttccaaagccttttattacagagcgtcaggaagatttgcctcctgccaggctgagtggggctgggccagctccctagagagcttagagatggttggatggctgctggaggcatggagggtggtcaaactgatagaatcaatacaatcttccctcagtaacacaaaagacctttgccaactcatgctttttgcactgatttttctctcctgaaaccatgaaatgggaggtagcatgtagcatgatggaaaagtaacaacagggacttggtgtccagcagacgtgggttccagttccagctcttgcactttctgacatgactgcagtttcctactttgcaaaaggaaagacaatatctgcctgaaaggctgccatgagtgagggtgagacaatatgtaaagtcctggtacatttagactctcaacatctcttcttgttcatcatagatactttgaatatttctcagccaaagatcaaccagtgggatttgtgcattttttgaggtaacaattttagggcagtgatttgtcaaaagttacgtactgagttccagacaaagctggaagccagatggtcagtggaacactcgcgtcaggtattctgttagtgcaatgggcatggctgttaatggtggaaatgtttccccagggaagtgctgctgggctctcttgcaccgccctggagctgggaggggaaatgcatttgcagtgggtctcttctccctcccaactgaaccctgggcccactggacaatgtctgtagaagaggggctctgagcagcagggacatttgagtcacttgttctttggggcttaggactggtcaagagaaagggactcctagagttctggcaatcctcccctaccctggagtggcagaggccctagtggaattggagtcctttaaggaaacaccaaatcaatgcagtggaggcactgcatataatctgaagggtaggggtcttctctggggccagtgaaggtgttgctaagagggtgggttgagatagcactaagctgacatgtgaacaggtggtaactgaatatgtggtttattttgggctttagaataatgagtcatattcataataaccaattgaatgtttcttgcctcagagcttccagagaccccaagacaacaggtgtcacaacttaaaggggtaagacttgcaaagagaggtagaataaacagctttatgtctcatcacctcttcagctctgataaaggagattgtttgggaggcagatcctttattattactattattattattattattattttgagatggaggtctctctatgttgcctgggctggccttgaactcctgggcttgagcaatcctcccacctcagcctccccaagtagctgagactgcaggcgtgagccactgtgcccagctgagaaagcttctttaataccagataacctttattgagttctttccatgtgccaggcatggtactatgtgctttccatctttaacccaattcattctcacaacattcaattatgtggtagtagatattattattattattatacctattttggtgatggagaagcttaggctaagacagataaaataacttattctaatgtctcacacatactaatgaggcttaaatgactgtatgaagcactttgtaaagcagaaggacccagcaaagaactttgattgttctgcatgaggcaggtagacgttgaatctgagtccttcgttttttcccctgcagttgagttctcttcctaggtgcaattcaagcatccagaaacagcagaaatgcttaggatcaataaattgggtggcagtgctgttaggcagtaaacttaggggagaattacacagggcagccatgaagacccaattctctaatgcctggggaaacactttgcaaattggtcggtgatgtttttaactgccttggatggtttcctatgagtgaaattgttctgtttggaaggtggctttagttggagacagtgttatttgattgtgttgaattcagtttgagtctacacaaatatgacacagagtctctgtcctgagtgggtttgaagtttaagtgggggaagggagagagatagtaatggagttagactattttagcatcactgcttatatgtgtgtgtgtgtgtgtgtgtgtgtttgcacgtgtgcacgtgtggtggatggggatcaattgaagggagtgaccatagaagggctattgtaaaataaatgaatctctactatgtcaataagataggcttaggggaaggggtatttcaagatgtgggaagagcacatgcaaggatccaaaagggcctggggttgccagttcaaagaccatcaacctatgtaccaagccctgctagtgtctgtggctaggatcattttcaagtggttcttctgtcttctgtgctttttgaggaagaagttgacaggcaagggaggtgggtctgaaaggaaggaatggccaacctggcttcaaaagaagcaccaccagagggtacatacagtcctcaccaccagggaggatctatgcctgaggctggccggggactgagctgggggaagtaaggctgagtgatatttcatatctttccttactgagaagtgactctcagtgagacttttaagactgaaacacatctgaaatgaactcccagccacactagaccataaataaaagggaaggagcctctcacatatcaaggtgaggctgagggttttaaataaatttttatcccagtactctcaatgactctgcaagatacccatcattatctccatttctaggtgatcagtaaaaagtggatttgaagatcaaatccagatctgtctggctccaatgtctatgtctcaaatgctcatcctctccatgtctcttccgggtttcacaatggtcagatgtctcagaaagttatgggcacgcgggtaacagaatggtccgtggctacctaacctactattccctgagttatgcctgtagtgccctcctagctaggtcccacttatgcttttggtccgctgctgattaaatgaatggatttagaaggtacttgttttccagtgtagacggagtagtccaaattcttgtgaaataaggacaatacatgtcctattaacagctgacaccaaaatatcttttaagaatgatactatttgtttggaatataacacattcttgggggtgcaaagtgagaccccccagcaacatgtgtatgaagataactgttctttgagaggcaaggtaaaaatttgcttgctactctagaaagacaggaaatgaaaagtggaaaaataagaggtgatgaggagagagagatggtgaaaagctgagaggtgcaggatgtgacagcccaaactttgagctcatgagttaacccaactcatgaaattcttggtccaaatgacactgtcataaacctatgaaaggatggagcttatgctcaggttaccatggagtagaaattggacctcaggtgtgaagatcaggaaccgagataaggaaatccaggaggatgtcagcagtcaggaattcaaagcaatcatggaaagaactctggactcccacaggccttgatttcggggtttgagccggtttaagtacattttcaagggatacagggactctagctgagttctaccaaattgaacttctagcactctccagagcaagatgagattcagctcagataaaagcattctgttttccaggaccttagaatccaggtatataacgaaggctaccaggaaggatctgttgatcatagcccaagatgcctcttggaaaagatacttatttgaatatcttaaagatgacagccgcccattcctgcaatgtgatcccacagcaatgtggacactggtttcccagcagcttcatcatgaggtagacaagtgtaatggctgagagtaaaggtcagagccagagattaagggtctgtgggtgcatcatggtgttaccaccctaaggctatcaacccaccttggacttctgccaaggggagaggagacatggggagaagagacaatcttaaagagcaagttacacaatgaactgagtaactggagttcctagaggggcctaaggcataaagcagagatgccttggagtttaagagccctgacaagatgtggcatagctgcctctccactcaccttggcttgagaatgacagcacgtgggaaaatctgagagctgggatgatgttacagttgatttctttcctgtctctatgaccttgtaatgccaaggagccactggatgacaattatttacttagagcttaaatacgtttaaattcagaaaattaagcacagctctcttctaggtgcttcagcaaaattttaaacttttgtgaagcataatgaaatagattctgctaatctaaaggtttgtggctgcatcagacacccaagtttggtaatgagtgaggcctctggagctagaaagtcacagtcatctttgagggaagaactttgtggaatttggaggtatatgtattagtgtttacaggtaagctagccagtgatgactatgatgatttttctttccatctgccctttagttacctacataaaaagaagccattgatcctctcagcatatttccatttcccatattcccctaagttattcccataagcatatcttagcaaattctgctagcagtagaacatgtcttggtctgtgagaggtgccttaagtgtaagcacaggtgagggaggaatggtggaagactttcttgcaattagctcttcctgttctatgcaagagcccttcttggacagctgcttttgcagcatctgtctctttgttatcatcatcacattagctagtatttgtggagcatcttaagtggagcaagcactatgctgaccactttccaagaatatttctaccttacttcctataatgtggtaaatattcccaccttattcagtataaggtggcctttttcctttttggtctccattttacaaatgttaagtaacttatctagtccctagcaagtaagtgaaaaaccaagtgtagtctcaggtctatattactctaaagtccctgcccttaatctcagaaattgtttcctagtcactatcctcagagaagaaaatcattgaaataattgtattcattcattcattcaacatcaactaaatacctactatgtgctaagtgcaatgttaacagtcaagactacaaagatgaacatggcatggtccctgactttaggaagctcatggtctaggcgtgtaagtagatgttataaaagagaataataggataattgcaagcatctcaacagagcattatgggaatactaaagaggaaccattctgcattggtggaaggaggagtgttagagttgagaaagaagatgagccttagaattcttgagattaaaaactaaaaatgaaactcagcttgtccaagacatatttctgcagggtttgccgtctgactatatgataacaccaatgatctcatttttcaagacaaaaagttaagcattttatttacacatcccactctattattctccatatccaactcatcactatattatactaaatatccctcctaaaaatcttttgaaaacatctacttatctccagaggcatagctaccatcctagcataatctatcatcattatctctcacttgaatcttggcagtaaccttccaactggtcttcccattttcactctttctttgagcttccttttctctgcaaagactaatctgttactcatttggaccatattttttctagtagaaaatttacatttataatatatattttaaagtctttactaaacccaacatttgggccttcttggtatctatttctattaaagatttttttcttgcgtatgtgtagggtccagccccacagggttggtgggtttctccccgtgtgtggagacgagagagtgtagaaataaagacacaagacaaagagataaaagaaaagacagctgggcccggggggccactaccagtccgaccctgtggggctggaccctacactatggatcagagttttctatttttattcatgtttagtaatttttgttgtatcctggacattatggatgatatggcataaatattctgggttatgttatcttcctctgaagagtgttcagttttgttccagcaaattgttcagtttctggctgatgaccttgaacttttagagatttggttttatgctttgttggtggaggaggaattctgtggtgttctctaatctcctctaacttcatagtactaaaatttcaaaaattcccagtgaatctggttgaggattgtttttagactttattagaatacatctagtgtagtccttactcaaggaccaagatcagcaaactttctcttgagggccagatagtaaacattttaggcttgtgaaccatatggcctctgtagcaaataatcagctctactactgtaacctgaatgtaaatgaatgggcaggatgtgttctaacaaaactttgcttataaacattggtagctgaaccaagagccataatttgttgaccctgcctgaggacatgatccttactgttgttgttttttttttagacggagtctggctcaatctcagcctaatgcaacctctgcctcccaaattcaagcaatactcctgcctcagccttccaagtagctggaactacaggttatgcaccaccacgcccgattaagttttggatttttagtagagatggggtttcaccatgttggtcaggctggtctcaaactcctgacctcaagtggtccacttgccatgggctcccaattacaggcatgagccaccatgcctggctgacatggtccttattcttaaggcatggctttctgatgtcttaactggatctccaggtgttaacaaggcctctacactctgactgagcaagaactccagtatcttctagcactacttgacttctagtatttttgctccactctcaacctcataacagcccttcctggtaagcttttatgccttctccctgtgtctgtgctgtccatgactcctaccacaaagatatctggggcccccttcctcacagctccccactttatcatggcctaccccacagattccagtcacttcagtagtctcaaaatctgattcctgcttctggtcagtgggaatgtcatgctctatatgggctctgcccctctacatcacagctagaatattgtccctaaatgaagaactgaaaaaaatgagatctcacttcataattttcttttttttcaaaggtcgtggtcttgccattgccattgccagaaagcagtttccttatatattctgcctagttttgtagtcacttatggcagagggctagcatagtgccagtgtctccattattgtcaaaagcagagatccccacattcatacctgctcttttcaatgtattttctactctgcagccagagtgatatttccatctgatcatatccagtgccctctttaagattattcaatgaccccttattgctttgaagatgacatgtaagggacagtatgggtttttgcccatcagtaaattcccaacacacagtgtagtacctgccttatgatagctatgtctatgatataactatttttgagtaagtgaatgaacaagaaataacatttttggctgacagaacaacataagcaaaggcagggtagcataaaatagtatggagaatagtgaactatttggtgaaattccaactcaggatgctgactacaaattactcaaaggcctcatgtgcagaaaatgtgacaattgaagcccatgttactgtactgccattttttttcaatcaccaaaggccttaaaccatttgctcagcatgaagctcttaagatgaatacagctgtcgaggcaaggcaaggaaagctttcttggacctcggttggctgtgttcacagacagacagatggacatgtgcgcaggcagaggcaatcatcaatttgctaaaaataacacctcaaccagtttttcacagaaaccctaaaggaagagaaaacagatcgatagcaagcataccacttgtgtgatgttgacgtcctccctgatcagagaaagtgaaatcaccttggagaccaagttctttcccagacagtagaggaaatgactaaggcaactgctactttggaaccaagggaggccccaaaggacttatgagttgattaaataaatctgacaggaaattttagataaggaaaattggcatttatgatactcagggaagggaaaagcaggatttgggcagcaatgtatctaggaccttttcgaaggaagatttttttaaatgttcagaggaaagcgaggtgtgggtctgtggtttgagactctggaaagaactcaaatgaggtcaaaagttctccaaaatatagtttcaaaactgtgccctagaaaatactcccaaggtgaaagaagcaacgaatgtgaccatggaggttagcaggagacagaaattcacatttattgggtatcctctgggtgagggcagactgcttggggctttccatgagttagctcatgttatctttataataactccatacgttaggatctattattcttatcttagaagtgaaaaactgaagcttagataagttacagtatctgactgaagtcacacaactaatacacagcagaacttcaattcatacccagatttatctaattccaaagcccatagaccttccaaaataccacatcgcctccctggtgtgcatcctgtttttttgtatgcagtagtaggtggcatacttctgggcagtctaaattttcagaggtcaagcctttctgtttcctgggccatagggtaatgaatgcagtgttacagagaaaagggagcatcgttatgacgaaaagggagattctcatttcagaaatgagaatgttaggcccactcattactggtaagaattctttccacttccccactcatgaaggccaacactagaatttatggatatatgtatgcatatatgtcatggccaaaggtcaaattccagctttatcctggagtccggaaggcacaggtataacatccatgcctgtgtgcttggcttgacatgcttgggttttaaaaatcaattaaagagaggctttgatctaacatagaactgatagcactggcaggtgctctctaagcttagtttcttgctatgcaatgcaacatttataaaattcattcccacctgtagcaaggcaaccccactttacatttgtgaagggtcttcaggaaggcaaataattagcttcggtgatagaaacagaagactgaacagaaacaaaacacagaaactcttgttagtggactcttcttccactgtctgcatcgtttggagtgctgcaatttgtagaacaccatccattttcttatacactttggtgtttttattcagacagacatagggggcgtgagctagaacatatgctggtgtgagtttggatgtgtgtattgaaagaagagcaggcaggagcctggaaaaaaatatgtgcaaatatggcaaggagcagaaagcccagcgggaattgctggtttcctagcaatcaatgaccaatttccctttggggctattcccagaagtgcagatcacttcaaaaatagatgcacgtcttagttcagtgattgacgtttttctaccaaggactgtgtgcacaagcatccctctagtgagatcttaagatcttggatttgagtattcacattcctaagactcctcttcgaagttccctcctcacttcccagacttctcgggttttatctcaggatagctgttccaatccggagtgatgaaaggatttcttgcagggaatcagtcagtggcagttgttgttctcaggacattcagaaccatcctccaagactcagctcaaaggccgcttcctttgtgaaaccctcttcaacttgtacgggccaaatgcccctttcacctttctctgcactttcaaatttgacattttcttgtaacacattttttttttttctaaatggctgtttttatgcaggggctatctttcccaatacagtagaagcttcttggttccatctgatttatctctgtcgctttctggtgccaagcacagacctagtgtacgctaggtgcttagaaatgcttgttaaatgattgaacaaatatacagagcctcagagatttcttatgtgctttcaaattgccattcccattcctaatcatcagccttgtattcccagcttggaaaaaagcagaagaatcactgtctaggaccgatggatgtcattgctgcatcagtgtaggacgtgacatgctacctgtcctggagggccaccaccaggagagagcacgtcacactcttgtgcatcggagtgagtcttgcctgataagggaagtcactcttggcacctatctcttgggaaaaaggagcgtctcagaccagagctggcatgtgataggcttgggggcttcctacaggaatgggactctaaggcttagcctccagagggttgatatgtgaggcagctcctggataagatggcaccaactacttggaatggacccagcagctagctaggaggtaggggtatcaagcaaggggctggatgggtggctgcctctgatgacatgtggatcccacactcagaccacaggataaactgggcctgagtgtcaccctcttgattcattttctgcactcccttagtatttaggcaacttccctgcataccacagccagttgcagctgctccacaggagaaccacaggattcatgggcttaggctagtgggctctaggaggagctgttgcagggagattgctcaagggaatgggaactcttgggccaaaggaaccatgatggcacagccagccacccgtcaaactggggaagcttccctctaaagcttaaatctccagagttttgctacttaaaatgatgaggctttctgctcagaccttctgataagtgggaagacagtgatacttcagttagcacaggacaagaagggaaatgacatttgcacagtatttgtcctgtaccagacactttacatgtctgctaatccaatctgctcagcagcctaatgatgtagatattatttttcctgtgttatggtggatgaaactgaagcctagaaagaagtgactgctcacaggataaaccgggaattaaatccacgcttcctcattcccaaccctggctccttctgattcttgcatttgaggcatctgtaaaaatgtatagctctacctcctcctgctccccatccccagcccaccactggagcatttttcactaaatgctgaaggtactcttggcctttacctacttcttatttttctaagctgcatggcctcaggtctgctccttggtgattccacctgaaacttctggagtgcatcaggctgaatgagaaaaagcattcagccagatccaatcttgtagccactgctcccagttaaagaaccagtgaggggccagactggaaatgatctcagagaccatctagtagaaccccatagcttttaatatggcgaatccaaggccacatggggagtgacttgcccaagcccatctgtagcaaaggagatgggtgggatgctagagccaggtttctcctggccacctgccttatttcttggatgctttgaccagcaggatgggcttcctttcactattgccatctggagagccaagtctgcatttgactacagacatgcatctctaactctggtactcgaatatttcttacgagattagatggctaaagtagaaatcagggccatagtcctgacactggaaccaggagctccctgcaggaagtcacatattcctgtggtgggaggagcaccgcggcagcccccctgaggaggtgaggctgagctgatgccctgcacggtcttgcatggctgagatgaaccggataaaggtgcattgctctgagacacacagacacactgccttgtctctgtctgtcttcctctctcgttttaaagcctgcatccctatctccaagtcagcaatccaattagtggagatttttaaagaaaacctcaatattgaaaaacagaagtctcagttaaggaggcctgccctgactcgttaatccaccggtcagtttgcaatggatcaggttgaagttggctttccccaccacctccaggagtgctgatttaaggggatcaagcccttaatcccagagattaggatctttgccagcagcaccagtacagtccctgggtcagtggaaagtcacataaagtacaaaactctgtttgggtttcctgagttaattatcctttttatttgttgtctttctgcaaataggaatatccaaaggttgcagaggctatccatgcccctgaggagcagcataatggcactgcctgccatgcacacctcgaagtgccagcaagccacccctagcctgttgggagcaagccccccaaaatctggccataaactggccctaaaaccggccataaacagaatctctgcagcactgtaacatgttcataatggccctaacgcccacgctggaaggttgtgggtttatgggaatgggggcaaggaacacctggcctgcccaggatggaaaactgcttaaatgcatcttaagccacaaacaatagcatgggtgatctgtgccttaaggacatgctcctgctgcagttaactagcccaacctattcctttaattcgcccatcccttcgtttcccataagtgatacttttatttaatttaacatctatagaaacaatgctaatgactggtttgctgttaataaatacgtgggtaaatctctgttcggggatctcagctctgaaggctgtgagacccctgatttcccacttcacacctctgtatttcttaattcctctagcactgctgggttagggtctccccgactgagttggtctcggcactagtctgtgtccctggcttgcccttccctccaactctgtcctgcaggatctctctctctcattaataataactagcttttccatatgagccatccaactctgtcggctgggaacttctaccctcattgccttctttgggttttcagacagttataggagtcagagcagatattcaaattctcattttacaggtgagcaagttgaggttctgggaggacataatagttagtaggtggcagggctgggacttgaaagcagaacttctgcctccatatctgtgcacacagcaccacctctgcagtccctgtaccatgattttctttgtgccttgctctctgttgttttccagaacagtccttagaggtaaagtggacacttcatctgccttaccagtgcccatgcacgtcctcatcttccttaccaagagaacccagaactggttcagagatccaggcctcccacctcaggtgactccaccctcagactgatctgaggataatcccattccccctaacaatgggaagggccatgtgaaccaattctggccaatgagagagggaaaagagtctgttaggaaacttagggaaaacctctcctctcttctaagagactcataagaagagagcttctcttcctcctctggacgctgtcctgtgtgtagcactcaggactgctgaagacatctaggtaacagcttgaaggtgaaaccagcactgaggtttcctgattcctgggtggagcgcagactggagcctaagccctgacagcatggtgagtgttgactgtcacacctggggctgattctgaacttcccatgatgtgaactcaggagttttcttactgcatatgcctgttagaatgtggcttctcctcttgtagctgggagcacccttcctggctgggatcagcctgcaggtgcgctaagccctcctcactcagctctcccttcccttacgtctttctctgttactctgcctctgtccttttgtcaggagggcttatacatgaaggggaacttgaagtacagaatagatgggagttctgcctagctcaggacaaatacttggaatacttgagataattgcattttgtttgtttggttggttttagtgttaagattctttgtggtggccatattacagccttgggaatggtagatccttttatttttcctataaaggagccaccccttccacagtccctgctgggcccttccctctaaccaaggctcagctgattgaaccaggcaggaacacccagctccagagagaatcatctgggctgccagctgtccatacattgtggctgctgttaatagaaaagatgagtaggcaactacaagtttgtcatctgaggactttgaactaagggcacaaaacatgttattagccagtggagagacagacatacacagacctgggagagcatgggcagctggatgtgctatagtatattcccccttacagcagaacagtcatagaaggtttgcaatgctcctgagccacctggaaccccaaagctctttcaggtccgggcacagtaatctctatctccaggattccctttgccacccactccttgtgataatctcccatgatttaagatgtcttccccctgcagctagacacccattccctggcatgacacacagggccctccgtgatctttcctgactgtgtcccctgctgtctcaacttgctcctcttaactgcattgcctccactcctctacacatgccacatccttccatatcttcctgccttggtttgtgctattccctctgcttggaatgcccttgctctttttcccctggtgagatcatgttcatcttccagaacccagctcctgtagctccatgattctttcaagtagatatgagtattcctttccttgttttctcttgcatgtgttcattcaaaatttatgtatttagtgcctaccatatgtgctgttatgactatgaaacaaggctggaggaggaaagagtggcaggattggggtggctgtggtggctgctttagtgagggccattggggaagtctctgagctgagatctgaaagcggtgagagagtggccttatgaaggtctgagagaagaccttcatttctagcagagggaacagaaaggtgaaagccccagggtgagaacaattctggaaaggaagacagcaagcgtagctggagtgtagagagtgaaggtgcgtcagaaaatgggcagggattaaattatacagagcttgatagcctcactgggccactgcaaagaatgtgaatttggtctaagcatgaagggaaattccagggaagggtatgagaggagcaagtgccaggaactgatttgcattttagaaaggttcatttggctgctggacagtgggaagggaagagtaaaaacagtattccaggcaggatggtgtctctggagggagaagcgtggcaggcctggggcctcctgtggagggagagtcaataggacttgtggacaggctggtcgtggaaagggagggcaagggatagactggaattgaatctcagattaaggcctgagcaattgggtacatggaggcaccttttactgagatgggaacaagtgggggagtgagtttggaggtagaggtcaagagctgggttaggacctagaacttgtcaaccatactgcaagactttgctacaagtcccagactccttgaggggagattccatgcattttttttttggtctctctcccccactctacatagcgcaagtcttcagaaaagaagatacttagtccattgttgatgaaggctttgacttccacaatgtccttattactgaaaaattgcaaatggtacatggatatccttcttttcattaccttacttggtcaccaccaagccattttgtttttatatttgattactcttcaaatggcagtaacatcatccctcagtcacaagtcaatctgacctccctccacacctatgccctcctttggtcctctcacagtcaaacatgacccaaatgggtgccaggggagccctccagttagagacttgtgctggcaggtgttccattagcataccttggttcaggaagatgtgatagcttgttcccactgggttatgtcaaattgaccaatcaatcaccaaccatatactgagcacctttgataataagcccttacctttggcttgcactttatagcttacaaaaagcatttttatatatccgctcattggacttgtgcaaccaacctctgaattgatgaggcaaggtctctggatattaaattccctatttcatttcaacttccacatcttgcaactaagggtcttaaataagactgttccctctgcctggtgtgttcttgtccctctcattggcctggtaaacttccggaaatggtaccttccagaatcatcttaagtatgaaatgacaccattcacgaccctcgagcagagttaatcattcatcccttccccctctgtgttatatgaggctatagggatatatctgcctttttattaccctctagatatacataaactatataatacatatatacatacctatctctctaatagataatattctttttgaggggaaggaatgtatttcacctcagaatctcaatgcctgatatattcctttacatatagttagcaatcaataaatcaatggccatatgggtgttcttacagcttaaggtcatattgtggagaactgtgtatattttgctaagggatatggaactcagcctgtaggcataaaatagtcaatgggagcttgatttatatcacgaaaggcagatggcaggctcatttcatagaatttatttccctgaaaattgatgagttttgatttatgtcttcccttgaaggtcaggttatggactgttcaactcactttgcctttctctctaccaagggtttcatgagaataagatggtggagatggtgtcagttatacatagcctgtttgtttgtctcacccaggaagtttcatttcaacacatcaaattttcattgagcatctactgtgtgcctggcactgtggtcaatgccgtgataataaggcaaggtggttggggcgccctttgcaaaagccctggaggtggggcctgcaaggcatgtagaatggtgacatgtctgagtcccctgtcgtgtagccttcattccatgctgttgtgatctgttcccagggacttgcagctcaagtatatctgtgcttcactggaagagttgaaagagctggagactgtctgtgatcaatgagcccctgtcactctcatgacactttcctgaaccatttcaccagcactcaggtgagcctgcaataatgggctgatgggatgggcccacagggagtgaggcagtggagggcagcagcactgatggatgttaagcatcagaacggcccactagaagacttaattgacttcttcaggctcttccttcgtgtgcacttattcatccatccatccatccatccatccatgcacacacccagctatttattctttcatccactcattcatatctttagcttaaagcacaggtctgcctcttctttttggtgcatatcatccatccatctatccatccgtccatccatccatccatacatgtatccataattcatccatgaacccttaattcatttttaaagcacatagttccttgctcaaaaaccctgactggctgtcatgtgtcgcatgttagaagcaaagttgcctgtcttagcattcccaattagcctatatttcctgatcatatctatatgaacccttccttagctcactttcccctggggcaagctggatttttttctcctctccttttctcccgccctctttctcctttcctctgtgccctccccatcactcctctccacctcttgtttgttgcagtccaactcttcattcacttaagtcttcacttcctcgtgtgactgtcccctttgctcttgcactagctgtctcctgggtgatctaccccttctctgaactactaaagctgtcagcatctgactcaccctttgggtttttgacttttgtgtccttaaatttatctttttataaatgtggtctttctcctccaagaatcctgcctttcttcagtcctagtaaagactattgcctttgactctatcccatctagccttgagcccatcaggactctgagaaatcaggaatgagtcttgatacttcaagctttgtgcttctggctcctggcctgagtcctgggcacctgtgaggctctgctctgaagcctttattctcagaccgctgtacttaaaggaagggtgcatgttaggctcacctagaagcctgtttggctttaacacttgtgtcattctcctgagccccagcactgggatgcaacctgtccccttaccccaaatttgatgagcattttctgtgaattgattagtcccagagaaccatatcactgctgtgtgtgtgtctttgagtgttaccattttagttacttcttgctgtgtaaccatttcaaaacctactgtttctcatgattctgagttggttgggtggttcttctgctggtcttccctaagttcatttaggtgactaccatcaatttaggagctccctggatagccttgcccacgtgtctggggtgaagtgactggaatggctgggatgaccaggcctctctctctctccatgtggcatctcatcctcaaggaggcaaggctaggcttctcagaatgtggcaggctgggagttccaggagtataaacgcagatgcttcacagaggcctcagctctggaactcacccaacatctctttcaccacattgttggtcaaagcaagtcacaaggccagcccaggttcaagagttggagaaagagatttcactcttttgatgggaggagatctaaaatatcgggcccagctttttcaattccccacctcatctaccctgttccattcaccagactaatctcccccagaagcgtacaccattccagattagtcccaagttctccactttagagatgacatataacaccctgggctatgacctcaggagccctctttttacctcactagatcatctcgactctcctatacactctgtgaggcaggggctatgtctagactctggcaactgtctgcacatcatcctgtcgcatatttttcagagcagttattactacctaaacttaacttcttgttgttttgttcacttgtgcattgcctgttttccaccaaaacaacagtttcctagaggaactttgttttgttcactgattaatcacagtacccagaggtatacttagcgcagagtaggtactcagtagaaattttctgaatgagtgaaatgtccccaaagactgtgatccagcctcaaacccattgataacccctctcccagctcctgtcactggcagatgcccagaaacatgttatttaggacaatttattcatttatcacacataaatgtgtgaaatgctatgaaggttgtggacagcctctttgctcccatttgataaatgtttacaagagtcttctatatgccctgagagtgctctgctccttggaagtgtataatttgtttgataagacaaaacttgaacatctggaaagacaagaggatgttgtctgtttcattcaaattccttcaaagcagttcatctcggccatttgcatgtgtgctgggtgcacattttttaaaaagagcaaaaaccctgccaccactattagcactcatcaaagggtttaccagcaatccctcaagacttctcaggctcttgtttagatggggttgttcactgaggtgaaattccaggtgagaggagatattatatttctggcattttctctggcagaagatgaagactgtgctctacctgttccttctctgaagctagaagatctggtgtttcgactttgccccagccaactgaccacattgagtgatgtgcttagtttacactgaataccaagagatgggtgggattgctgtgcatatatattagcaggattttggctggaggccacttgtgacctctattgaatgtaacttcctcactcaggagttgatatggaaccactcactcctattggctcagtgcccagaaggcctcagagagagcccacaagatcaacccgacagaccccggctttccaaataaagaaacgcaccccccccaccccagggtaggggtctttgtgggtcctgcctacaccctcctaggattgctttcaggggctcagaaaattagcagtgatgtccatggccactacctgagcagcgtatgcttccatgtgaggccgggttatggcagagctgtgatttgtccttggaatctaggccacatccccaacacccataggcttccccaagcatggcaaggaaagggggactcagggaacccactgcccttaccacaccccaacccttggtcataaataggggagttctgaaactgaaggtggtgagctcccgcctccagactgaagtgatgatagaactcagtgcctctttatcttcagatcaaatcttatgacaccaggcccagccgcttacctgaatcaaggctgagtcagtgtgagtaaataggaccaatggtcactcccaagtagaacactaagccacccttaggagatctgcacgaagtgatgggcgctgtccattgtacctgctttgtgccttcccctgctccatagcctggcctggctggaagcacacagctgtcatctctgggaacattccattctctgccctcctcctgccttcaaccatgcacactgcctgtgacctcatctcctctgtcctcagggactgtcacaaccatctgcctatcatattttggagttgactatgaaatgaacaaggatcctgaatcttagttcttccagaaagatagatttcctcttatggtgtgaaactatggtcttcccaaaacgcacaggtgccaatcttcagaggggccacaatgtcatcatgaaggtgaaatatgggcttcatggtacacgtttacctggataagcatggttcatataaggaatccagaataagatggactgaagattccctcaggactcctttctcagatttcctgctccaacctgtgttaaagggggccactagaccatttagaataccctgctattttctttgtcatttaactttatttataagtatataaaatatagaaaataatacagagaaaaattaaacaaatacccacggcccatctcaggaaatgaaacattataaatacaacagaaggcctctgtgtgactctcctagatccaactccccatctaccttccctcctcagagataaccaccacctgcaacgaatattcccaagctagatattatgcttccagcacatgtgggaaagcaaacatcagcttggttaacagttttgtttgcctgctttaaatcttgtttttttgttttgttttgttttttcaagacagagtcttgctctgtcacccagcctggagagcagtgtcatgatcttggctcactgcaacttctggctcccaggttcaagcgattctcctgcctcagcctcctgagtagctgggactacaggtgcataccaccacgccccgctaatttttgtatttttaacagagacagggttttgccacgttggccaggctggtctcgaactcctgacctccggtgatccacccgcctcggcctcccaaagtgctagaattactgacatgagccaacacacgcagcctgcctgctttaaatctttatctaagcaaaagtactatcttcagaatccactgtaactttttctgccctcaacatcaagtttctggtattcagccacgttgatacaggctgcttactcatttgaccatctccttctcttttggtggactgttagggtgtttctaatctctcactaccagagtgccgctcacttctcctgcacagggaggaggagctctctaaggtggttctgttcgtttaggtgtatctttgacttaactaaataataccgaactgctcttcaaagtgtttgtatctgcattagcataagagttaccattgctctaccatcaattagtacttggcactctcagattttttcattcctgttccttggatggtgggaaaatggcctttgctcttgctttaatttgcattcccctgatgatccaccaggcagggtgtatttcatgcctattgaccatttctgcttccacttctttatcttacctgtccatagccttgtccattttactattgagttgttgatctttttcttattgatttatagcagggtttcttagcagtagcactatcaacattttagactggataatcccttgttttggcaggggttgcgtaggggtgctgtgctgtgattgaaggatcttactagcatccctggcctctactcactacatgacagtagcaaattctctcccacaacagttgtgacaaaaaataaaaatgtttccaggcattgccaaatgtcccctggggagtaaaactgccctcagttgagagctgttgatttataggaacactttatttttcatagatgttaatctatttttagccttacaaattgcatatatctttacaaaaatattctaggacagtcaatagatgtggttcctctctgtctcaaaaactttgccatggagagaggaagatagaacggcacatttattgtgtctgaagagctagtttgggtggtctctgtttctattttttttttttttgctgcagatctacaagatatgtgttaatattcatattttatagatgaggaaaatgaatctggtaatttgcccaaggacactcaaccaataagagtagaaactggtacagattcaggtctgtctgtttcagcagagtggaaagaaggtggcaccaggagtggggaggtctgatcttagtcctggctctatcactagctggccatatgaccaacgcctggcctccacacgtcagtctcctcacatgatgataaaggggctggacacaagatctcaaatgttccagcccattctaccaacagcagagtggttggctttgccactacctcatgagtgattcatctctgaatctccactccttgttttcctcatatgaaggtagagatgcaaacagcactgagtccccagggcttctgtaagcattcgacgattcatgtaaagtacttaacacatagcacaagttccatagatgccatagactgtcattataattccataaataggagaccagttagtctggattgggaagcactgtgaaatgtagagtgtgatataaaggaatatttcactacctttaggtataaataataacacccaggaagagttttgtcaataggtaactctccttctttgaaaggtgaagaaaggagctctgtgacaagcttgtggcttatatggtggtggtgctttgaagagttactcaggcctacctatggtttgtcctcttttccaagagaattggcagctgggcagtgctatctgcaaaaactgtacggagataaatgttaacccaggggctcccagaaatcacaggatatgaatggggctctaaatgcatgccttgctttcctctccatgaaaactgtatttgaaacaagtgagtcaagctgctctggactcggtaggtttcatgggcagaggggcaggctatcagcaagcagggccccccttcaaaagagggagtacagagaggcaaggggctctttaaacatgcatgccaagagagcaaacgccccacagctaatggctctgcaggcttagaaaggggatgcctgcagagtttgcctgtaattagttgttaacacatgaaaataaaagccgatttggaaacagagtccatcatttatttatagcgatccaatgcaagtattgttttaaataaaaaactggacacagttcctagtcagaaccaaaccattcaagtagctccagatttacctcctcactcactcaccttctctctaccttttcttagaagtccgcctagaccagactgacctgcctgagccctgcaccctttggctttcaggcttgcattctgccccagactgttgtgcatgactagatcgtgcccctgattccttgcacttgtgcctctgtgtgtgtgctggtgaatgaaaagagcacagacttcagagagaacccagttcaaatcctgtttctagccattttcagctctatgacctcatgcaaggccctctccaagcctaggcttgttgtaattcaggtatagatgtgactaggtatggggagcccctagtatgttgcctagcacatagcaggcaccctcattccctcctggccaaggtctgcatctttctttttcattcattcttaatttatggcagaaaaatcagaacagcatagatagtacaagttctagagccagattgcctctctgtgttacttcaagtgacttacttaggcttacagcgcccaatgtcctccaatggaaagtgggaatgataccagtacctacctcacagggcacctgtgaaggccaagtgagcacttaataagaactcattgcaatccagtgctcttggtacaggcagtgatagcatgcaagaaggagatgttttctccttactccctacccataaatgctatacctggagtatggtgagaaagcaaagggcacctggttctttgagtctcacagacctgaaccaggatcataccgattccaccattgtgatcctggggaaaggtatagaacatctctgggcttcacttttcttctctataaaatgggagtatcaacagcacctacctcatagagttgttgtaagggttatatgcattaatatgtgtaatgcgctcaaaatagggcctgacatatagtatgttctcattaaacattaccttgtaacaaatgtatgacctctttgttgactttgagcctcttcattcatcttttctcctctgcttttccttcttataccttcctctggccagaatacccaactgctagggcttgagaagacaatgttgaagacagttagccctctctccattgccactgagtgctgtgtgatttatacacagtatcccagggaagcctcctattactgctgcaagggagggtcattttaagaggagtccaaggcttctggaacatgttatgctccctctgtggccccaggtctaagtgcagcccttaaattactgtgcagcttcagaagagactgaagcatttccttgtcagaaaacagctttgctccttctggaagggaatctccaggggagaggtgtaaaggaagaggagcggcgagcagggcagcctgacatgggattcaggtgctgctgagaggcctccccatgctgtggagacaacagaccctaccgtattggttctctagacccagtgcttcccaacctggcacagcattagtatttcctggacttctccccagaataaccaaacctgatatttcaggaatatggccctggaatgagcattcttaccaaccacaggggatttgggtgcagcaaatgaacaacagtggaaaagcagttcccctagcacctatttttaccagtcccctcattctctaaggaattagccaccaactgagagatgtcccagatatgactgctcagcctcattcccctcctctgtgttcacaccatgttccacccggcctgcccccaacctgtcttacaccaccatccgtgaaactcctacccttctgcctagggcctctccaaaggagagaagagaacctttccagtggcagccagtggtgtgttcctggtgcttgaggtgtgagttgaaaatgccattattagcatttttcatccagctgcatccaagcctggccacgcttctgttgcttacttgggcttccaatctccatttacaggttttgcacacagcgaggactcaaggactgtactttctgggtggagctgaatttctataggaacatacttcccgtctcctaaacagctgacttataagacacctttggaacccattctactggcagtttagagaccacctgcccttattttatttaactgaaccccttccactctactttgggccataatctctgattttaggaatgatgagacgttctgaatgcccttagaagtgttcccctatctactggtcattaaaagcaaatgacagcacagtgaaacactgtggtttagaagtttctaatcctggtagtaactcaagctgacatttcaattctctgagccttaatttttatttataggacacgttaaaccagatgatttctaaaatctcttcaggctctgctaccttactcatttacagtatcagtcatttacaccttagtatgaataaagactgaacaaagtaaaatgggtgggcgagacaattgggacggatagaagaataaagggacatagacaaaatggctaagggacaccaagaaaaaagttcaaacaagtttccttagggaagcctttgcctattcttgggaagatctttatacgtttggggttcagtcactatgtcattagactccatctctccccttatttacttcactcccccctcctcttccctacaccaactctacaactgacccggcttgaccttgacagagggggcactaatggcttttcaatacagccccacctggaaggtgctgatttcgcataatcctaagattagtctagtcacagttcatatagttcagggactgtaattaaactgtggagctaaacattggggtctgtgacctgaaacagtgaccgtggtaaaaccctgccacagcaggcaagaaaagatggatggggtcagaattctctagcttctgctgctgcatcctcacctggtcctagggagcaccttggaagcggttatagaatgcaggttaatggtcaggtgcgctgtctcactcctgtaatcccagcactttgggaggtcgaagcgggtggatcacttgaggtcagggattcagaccagtctggccaacatggtgaaaccccgtctctactaaaaatataaaacagtagccaggcatgatggtgggcgcctgtaatcccagctacttgagaggctgaggcaggagaatcgcttgaacccgggaggcagaggttgcagtgagccaaaatcacaccattgcactccagcctgggtagcacgaatgaaactgtgtctcaaaaaaaaaaaaaaaaaatgcaggtgggtgactcagatgttggctcagggcacactggaacacgatgtggcttggtatgtttacaaacctctaacactccgcctcattattctggaggggaaggtagaaaacaaggagatatagactagggctgcggggtacccatccagtttattcattcaacattcattgagaatcacgtgccttactgtgcccagaattgtctcctcctggtgggttctcggtctccctgccttcaagaatgaaagggcagaccctactggtgagtgttacagctcttaaagatggtgtgtcgggagtttgttccttcaggtgttcagctgcgtctgaagtttcttccttctggtgggctcctggtctggcagacttctagagtgaagctacagaccttcgcagccagcgttacaactgttaaaagtagtgcggacccaaacactaaacagcagcaaaactcattcagaagagcaaaagaacaaactaccacaccgtgaaaaacaccccttggatttcggcgtctggctcgggtgggctgcatttattcccttatttggccccacccacatcctgcttattggtccattttacagagagctgattggtccattttacagagagctgattggtccatttttcagaatgctgattggtccgtttttacagagtgctgattggtatgtttacaaacctctagctagacacagagtgctgattggtgcatttccaatcctttagctagacagaaaagttccccaagtccccacctgacccagaaggccagctggcttcacgtcttattaacatcctgaactccagggttggtacccacagggtagtaagttgaccaccagaccactttatacagcatccaaactggcatggagaactcagactccattcagatggatatcaattccatctggatctaattaaatgcaaaggacccagcatcacaaatacaggtggcaggtaagactcaaagtcaggagtgcagcactgctgcaactctgggtatagagttctatgagagcagggctttgaccattgtggtgggagagatgtatgcaaagagggagcggaaggaaagagctggggactagagatctgagtagaaaccgcactacaggtggcatcagtatcatgaaagaatgcaaatgatgttacttgtagatgtgtgggtccccagggcccacactaggcaaattggatgatgggtctgttgcactaaaaccaatgccaggctgcactcatgagtgacgctgagggtcctaatggctccctgcacctatcaggttagctcaggattaggaggagttaagaatgagagtgaagactcaatgaccccagctcagcacctcctcctcactcttgtttttgtgaccctggggtccccaggtacttcgtcagtgggatctcactcttgctgcgtctcagctaatataagataaggtggtagtaatgtcttattgtagcacctccccaagatatgaaaaataactaagttctttttattaaatggcttaaaggcctatgggatacaagcactacaagtgtaatagtgtcatctgcataggggcacctacccagggttaatgggccacggtcatgtagataccacctttttggtttatgcggtaggcaaaatttttaaaatgtccccatcctcaagatcacacctctaatctctaggatctttgaataggctgagataccacgtccatgaatatgttacatttacagcaaaagaagttttgcagatgtaattaaggttactaattagttgaccttaaaataggaagattagcctggattatctgggtgggctcaatgtaatcccatgtgttcttaaaggcagaagaggaggacagcaggtgaagtcagagagattcaaagcacaaggattcaactttctgttgctggccttgaagatgcaggaggccatgagccaaggaatgcaagcagcctctggaagttgaaaacgacctaagtgctcagtcctacagctgcatggaactgaaatctgccaacaccctgagtgatccggaagtggattttctcccaaagcctcctgataggagccccagccagctgacagattgacttcagcactatgacatcaaagagcccacccaaggctgttactggaaggagggccttgagtgtaagttattcagtttcttggcgttttgaacaaagacttggacaaaacacacaaagtaacaaaggactgaaacataggaacgaagtagggaaagcaggaatgtattaaagtgaaaaaggaccccacagggtgggagtcggcccaagcaggtggctcaagggcccagttgcaaagttttctgggttttaagttctcctgttcagattcctattggctaccctttatctggatgaagaatttggcctgtggctaattaaaggatgaagtgaattggtgtcctatgcgatgaagggatggtccctgcttggtcctcggcccatcgaaggcactctccctgtccatctgagacattgagtagcctttgctcctttgctactctggagcggggaggtggggtttttccttttggtttagctttaggaagttggtttaattggccttagcttccctgaccgtagacccaggtgctatccttttgattcagctttaggaagtcagcacgaattggcctcagattccgtgtccccacaccttggtgtttttcctggattcagcaccaattgtccttaagttccctgcctccagacccttattctccttcctgaagacagcttgaacttctgacccacagaactaggagctaataaatgagtgtagttttaagccaccgagtttggcaatttgttacaacagctgtcgaaaatgaatgtaatctacaaaataggagactgtcacttaggggagggacagtaatgcgttgtgagcacctggagggcagaaactgggtgttatttatttggaggccttacagcctgatatgtagtaaatgctcaataaatataagtgaatgaatcaatgaataaatgttaaaaggataagcaaaggagccaggctcagtctataaattaatgatttcccaaatagctgcagattccaggatgtgttcaaccgagaggcaagggtgctgagaggttagcgcttaagagtctgttgtctggagtctgaggtctaatctcagtttggtctgctagctgtgtgacccttgggcaagttacctaacttctctatgcctttatttttccacctgcaaagttaggatagtaacagtaactacctcatagggttgtcacaaggattaactaaaggatgtacctcaagctcttagaacagtggcttgccatagtaaatattcagtacatatttgcaattatttcacagatggaatcaaaatgatctgatttcaatttttgtttctccaacaaggtactcgattggtctccacaccccaccccctcatacacactcatacaccccctcatacacattccaaagcttcattttctcatttataaaacaaagagatgaacattaagaacattctttattttaaaaacctctgtcatgttaaaaagcagtgggcactgttattttaatctaggcaaagccctgtagttctcactgttgctggcttttcaaagtggaattcatcagcaaataacgttactaatgctgcaaatgagtggggctgggtggggttgggctggctctcaccctgccctccagatgcaatgagtgtggggacactggtgacttctacaaaggctcattgaaaaggtccagtccagcagcggcttggtctaaggtaaggcttcttttctcattgattagctgagcagggggagaggaagctattagttttattgttgtttttctttattggactcacaaggcctcaatgccataaacccataaaccagaactggatacaatctattcttaattatacagggacagatgatctgcattacaaattgtccacagcaaaccttgctcactaattattgatgagattgtcagtcacttgccctgcctaagctcatgttggcataaatggccccattacttactgcggacttagaaggccttatattagaaatgcttatgtgtggacatttctctgcctgcctccctagaagagaagttgcttcgcagtgggcactgtgctatctatgaaacacattgaatgtatgccccaaccatgaccttccttccagaacagaggaagggagccaagccagccattatagctatgtctgtattcagctctaagcatcaggacccaaactccaagacaatgcctgtcctgtttaggccagtgttttgcatcggtgtttagggaaaatctctataatagaaactatagaaggagaggggactgtcttagggcatgtcagaacatgcccagattatttcatagcccatagcaccgaacataccaatgttcaagggtgagcactcaagcagcttgtgaagccccaggtaaatgatgctcagctgccacggtttcattttattcagtcacagcatgggcaattaagaataaactgcatttgatttctctgtggttgagaaaggatcttgatgagatgtcatcctggggctgagtgtgtaggtcccaggcagacatgttctgggctcctggagctgagggtggggatgagcaagcctctgcttgggtttatctcagccagagctacaggccttttggattgttttctttcctgtgccctagccttgaactcttggcacagttcggaaatccgttttcataaaaccgatttatttttccatttatttgattaattgaaattgctaatactctggcctctaggtcataaacactggataataaaaccccctctacatctgtccagtattttagtgttcactaagcatttcacatccatcatctcaaaggtaggcagggaagggatcgccatctttagttcatggagagggtgacatgtgttgtcaatgattacagttagtatggagcagagctggggctggaagctggttcttagagtctgagtctagttctcttgtggggtggctaacaagagaatgaatggctcttgttgaaattattccagtttaccccaggactgagttgatttttaggatctgaggcttttaattttaaaactgggtaagttctgggcaaattgggaggagcttgtcactctacttcagaatcccagggtgtctgttgtgatagagccctgtcacctccatcaggttcaggggagggaggtggcatgtgacttggcacaggtgaggcagatgttgtacctggagcagccaaccagggctgctagctgagaacagccagaagaaccttatggatgatcagagagtggcaggagatccatctaagtcagatcttggggtggggtttgatgggttgtggagggacaggaggtactggtgatggagtgacccctcctgcctaggctgcttgtggagacagttcgtaggagaaggattcggaagcctgagagtgctgagccggagaggggacactaacaggaactgcctggcaagaaagacccatgagagagacaccgatggcctaaagacaaagacagggcagaggcaccatggtggattgatgggatgatgggggatggagggaaaacgtcagagaaggagcagacagagagaggagggagggtccatgaggtagtttcagttggagaagagttttggggccctcacttgccatccacagaatctctgtccttgtgggctacagcctccttccctccagcctagagattaaacccttcctaataaaccagccaatctaatttagttggggtggaaggagagggaaaatgatttgttcaaagtggcctgagcctgagctgagtcttgagctctccagtccaggttaatgggcttttagccttgaatcagggcaagagccaggcaggccacgtggctcatggatgtactcccttgtcagcctcactgtgtccttgacccagtcccaggacctctggccctgggaacttacatgccttccccagtctctgaaggatgggatctcatgtcttggttccattcccttgcttgttagcattttgcctttattaatttgaagaaattcaaatcttattgagaaatcattaagttaaaccaaacccagaacaaatcaactgagtagaaaattgcagataccagctgcactttttccttcccacccagagtggagaaaggactgtttttgtgattaccacagaggcaagcagggagagtgaggcacctgcactgggcatgtggtcaccatgtgactggccagaaagccccaggagttggttgcaatatgggaaaccgtgtaatgctgcagggaatataaataagacagaaggaatcagctaacagatgggatttcttatccttttttgttatggcaaccaggtaggatgttataacctgcattttagttttcccttctgcccgctagtctcgatgttttatctaatttgtagttttcttagtcttgatatatttaatttatatcttttactttattacatatatgtcttgaaagctgcttcaaatcctctgtggaacaaagtgaggaataaatatacagtctgacgagcctctccactagtgtcctttttggagcgtagtgccacagtataagactaagtaactagggaagaaggatggcggagtggtcatgcatgcctccgcaataccttgtctcagttggtgtgcagaagggggcactcagccacctctaagttgtgccagtgcttcctagactcaggagaagcaagtgaacatggctctgtgtgagctggcaaagaagagtgtccaccgcagctcttggctcctggcgcaaagtcaccctgtctcaggatcttattgaattgtgatttcatgaatatcctcataaagaagccagtctatctttctggagcttttttctggagcttctgggttctcatattttatattctcagtctgagtttaccatctaggggggcagggggacctattgtaacctgctcgggtgaattgagatacgtcttataaaattcttgggttattgcaatagcttcctaactagcatctctgcttcattcttgcctccctacaacccactgattgatcattaaaaaaatgtaaatcatcactatgccacttccctctgtagaaccttgcattgctcttggcgtaaaatccatggttcttcccaggctttcaagaccctgcgtgatctggaccctacatattcttgtctcccttgtcattcttcttttggctttctgaatatgcccaatgtattcctgtcttgagtttttgctttgcttcttcaattattattgcttgttacaggattttcctgtttcttcatgtagtaagttctttcttattctttaggtctcaaatctcatcttagacctgccttctctcccaatccatctaaactggctccatccctttcactctgctcgacctcaaaattatccatcacatcatgctacttacatccagcatttaccacgatctgcaattatcttctttattttctcatttgttcattatacacctctctgagcagtatataagcttcagagggcagagacttgatctgttttgatctcagctataactgagccacacctagcatctagcactgtggctggcatgtaggaagttcttaataaatatttgtgagattaatgtatcaatgacttaaaccaaaagttcacaaactatggctcatgaaccaaatccagcctgttgcctgtttgtgtaaataatgttctgttggaacacagcctattcacttacatatgttacatgattatgtattgtctgtggctgtttttggtgctaccatggcagagttgagtacttgcaacagagatcatatagcctgcaatgctggaaatatttactatctgatcctttacagaaaatgtttgttgacccttggcttaaaccataaccctaacaatggcttaatccatatgggtatttagcgtttcacttaatgagaaacagaagatctcagggtcagttcagtggctcagtgatgtcattcagaactcacagtcctgctattttgtgctcctctgtgctggaaatatcttgcctcaaaggtctaagatggctgccacagctgtacacatgatgtctttacacatcagagttgtaaggaaaaaggagtttagtgagagcaaaaactggctttcacatgctcagcgcttgcccagtgattgacaagaaggtgattgactgccatgattggcttagattggcttagattggccgtgattgactgccatgattagcttaggccagtcatgattcatgccttgaggttgggcataacacttgtagtgagcagagaagaaggcagacctctgtccacttgtatgaatgaagcatactcagtttcctcaaactcaaggtggttgtgattaaggactgaagttgtctactctctccccttgatagaattagaaatggatgggcacattattactcttttttccttttctagctttcagggggatcttctatctaatccttcaccctcttcaccattttcctcccactcgctcccagccttgaccatgtaacataacttcaggcaagtagatctcagctgacttcataacagtctcacttgattcagattttcctaagaggacagcctggcctcattataaagatttaggaacaccagttgggactgtaaaatgttcccaattctattccccaccagccaagtctgatgctttaaactccactatgcaagggacattttagtttaatgcattgttgttcagaatgtctctgttaaaatgaatggtattttcaaaagaccatgcatgatgtgagcttatggcttaatctcaaaggtatgacatcacatatcatcttggacaacagaaatcttgaccttgagaggagcagggagaatgttatcatggaaatagcacagaatcatgagatacctagattccagttcttgtttgtctgttgctctgttatccaccttaggtaaattcactttctctttctggacctcacctccctcatctgtttgatgaaagagttggattcagtgatctttgagggccctttcagctggtgaagagggattggccacacactttgtacagtttcatgtccacatcactgccttcattcactccttatttcttgagccattcttccgatccatatttattaagaactttccatgtgctaggagttttcctggatgctgggagggtagcactcctgctctcttgaagcttactgtcgaatggggaagacagaaagagtaaacaagtaatataacaccgtgagacaagtgtgaggaaagaggagacaagatcgcatcacaggctcatttcagtccaaggcagagagggaaggtgttaccttatacaaggggtcaagtgtggctccccagatatggagatgtttgagcctgaaggaagattctgagttgactaagctaaaaaagtgtggtgggagaagaatctctccagtaggggtattggcatgtgttaagaactgttagtaaactgtgtatcatttatgctatatcaggttcaccatttctcagtcaattcacttgctgtgtggcccattcaaaatgacaatggaaagaagaatcagataaatttaagaagaacctgagccaagtttatccaaccaatcaccactgggatcacagttaatatctatttcattacttaaataaacatatactatacattttaagcatgccacgtatatcagattcattgctttaaaatagaattatcaaattgtcacagtgtgctaggcacttggccagagccagagaagggaagtagaagaggacacagaccatagtctccaggagctcagagcttagtgtggagacagttgagaacattaacagcacgagtacagtatgttcccaggcacacagaggatgctgacactatcaggctggggccaggaaagctttcagaaggccatgagccccctgaactgaaattatttcttatttatttattttactgtggtaaaataaacataacaaagtttattgttttaaccattcttatgtgtatcattcagaggcattgagtacatacacaatgctatacaaccatcaccaccatccatccctagaaaccactcatcatcccagacagaaaccctgtgcccgtgcagcaaacactccccatttcccaatcaccccagctcctggaaacctcgattctactttctgtctctgtgaatttgcctactctagacacttcacataaatggaatcacacagtatttatctttctgtgtctggcttgtttcacccagaacaatgtccttaggattcatccaagttgtattacgaatcagtatttccttcctctcaaaggctgaataatattcatatatatatattcacacaccacattttgtttagccattcaactgttgatagacacttgggttgtttctaccctttggctactatgaacacagctgtacaactgtctacttcagtgcttgatttcagttcttttgggtgcatacccaggagtggaattggtagatcatatgataattctatttgaactgaattttgaaggctaagaatgaccaagcaagaggaagcaaacacacagtagattaatgccaagggaggatgcatttctgtggggtggtccacccatcatataatctctcacttgtccctccctcaaagagcatgctgtgtcccactgtggctgcaaccaccagctcagttcctggtttccctagaagtgcgactctgggttcattcaggaaaagagggtggatcatggtaccctgtgggacatgccctcctttcctatatccttccctacttccaccccaccaaggaacatcctgggtcttttcattcccctgcctacctcactgagttgttttgaagatcaaggggcagtatggattgaaagtgctttataccttttaaggcagtagtagatatttgtggccatagctgttgctattgtcattgttgtcctctttgttaggaccattgtgagcctccagtgacctctcctggcctgaggaagcaaagggggagtcatcccagccccctgcacaggtacttcatcatggtgaggaacaggtttcttatttactaccaggtctgctaggctcatgaaatgaagctcaggtagaacaccttcaatggctgtgtctctacaccacatcccaatctctacaccacaccccaatctctacaccacaccccaatctctataccacaccccagtctctacaccacaccccagtctctacactacaccccaatctctacacaacacctcaatctctacaccacactccaatctctacaccacaccccaatctctcctgacaccaaagtctataatgataactgatgaaaacagagattcactcatcacatcctgagacatacaaaggaagccaggctgccgttttcacttagagtgtccacaggtctgcatgggagaaaatttctagaaattctggagctgtagtcttctccctccaagagttggtttccaaagcttggtttacttgatttcaaacatctaaaccataggtactcaggaacagctgtgtgtgtttggcacattgctagggtctgtgggggtagagaagcccaagacatggggtcttagccttcagtctggtcattggcttcattccaacgtgctcaaatgcttgatgtctatttcctaacacctctgttcctgttttctgttatattctgctgttctgggctctgagggtgactgccatcctctgctaaaaggctgtctacttttaagtaactcctttgctttcatttgggaaagctgtctttcagttactggctgcctgtctggtttctacctatagtcaatcaaaacacaggaaactgtctgacatggtatatgataagattcggaattgtgtgacacataaaattgccccagagtccctggaccactctagacctctgatagttagtaggggtccagtttccccttaggctcagaatggcaaatagatgccactggggctgcatttctctgcccccagcagacatggttaatccatcttggtgcttttcagctgagccaaggcttggcttctgaccttttctcagtgcaaagctgtcggcagccgccatcaatcgatctgagttggcacttagagtatgtagcagacagctggtgtctcactccaatatcctttctgggccatccccccagctgctaggggtagtgggtctcacaacccaccattgcacctgtctcctgagaattgttctctgctggccctgataggagccacctcaccaggaaatgtctcagatcttatgtcttgactgatataggggcacaaaagcctgatgcccttgtctcaaagtggggccactctgtgatgctatttgtacatattgatattcctgggatcaagctgagaatgactgtagctttgctgagcccctctccttgctcggtcccccttccctcacatccttacagcttttgttttagtttgcttgcaccttcaacagatcactcacacaagaatcctcatctcagggtctgttcctagagaaacctgagctaacctaggtcatctgccatacctgccctgcctctgctcctatacctaagaaggaaaaatcaaggacaagaataaattgataatgtgcaaagtttcccattctctggctcctgtacagtaaacaaaccatcatcccacaagtgtcttctgggctctggactcgtgccaggtactgtggtgcgcactgaggacacaccagcacacaagaccaaggagggcccctcctcatggaacttccattctatcttagcttgcttttcctataccacttgcattatctgttccatgtatctctggatttcaggtcaccattgaccccctgctctgtgtcccagtgctggcattctgccctattctgacaaagatcatctgtccgatggttaacttagtcttaaccttggtgttcactagctgccggagccttctctggtttgctctgattttaggccagcctctatctcataccggggcatatgtaactttggagatggctgggtcaggcacaagcctgaagtgagggaagcttagagggggtcagcattgtctatagtgagttagaatacaacttacaataccatcactgataacatccacttgcattcagcactttgcgatttacaaagcacttttatgcttgctatctcatttgcttctccaacaatcttggaaggtagacttaattagctctgtgtacgtggtgagtaagcttaaggatgggtgtagataggactggactgcgagcaggaaatctctaccccggaccaaagtgaaggaggagggtagaatggaaagaacagagcagcttctgaagcatctctcaggagacagaaggtcaagtagcagaatcaaagaccttccactgccctctcctctgtcttctgttcaactcagggagtagaaggtctttgaccctattgcttggccttccatctcctgagagactcttcagaatccatctcttctttccattctgctgtgctctggtgttctcattatctgtagcagaagttttataatttgcagcttacagacccctagagattcacgggagagtttcagagagttcataatcccctttccccaaattgaagtgtatgtctatttttacctgcaaagtagttcacacatttcacaagatccccaaaagcatctgcaaaccacaaaagtcaagaatcactgcttaggttttgtggccaggatatacaaaggacctgagatgaggacggagaaaggtttttgataatatcaaaacatccactgcagatgcagcaattgtatgtgcaggcacagctgtgatgtccatggaacatctggctgataaatgaattttcctctttccagtggttttgaatcatgcagtgacagatttttagagcgagatgcctgttcactgctgggcacttgattgtctctctgggtcccctcattggtaaaaaaaaaagcacattgtggctaggttatcttcaagggctcgcccatcactgatgttttgtgcttttgtaaagagcctcagaaatcatctctttcaggatctatttaaaaggttgcagcatgcagtggctaagggtgggtttctgagctagaaagctcaggttgcaatctcagctttgcctcttggtcaggttttctctctgggccttggtgaaatggtgataatgatggcagcttcccgtagggttactctgaggaggacaagagtcagtcatgtgaagtgcttagacgaaagccagccacacagtaggcacttcatctgaataagtgttgacttttgtgtaatttgcacatagaagagagaactgaagggtaataagtaattttgaaaaggtcaatacagtgagaaagaacaagcctcagattcttgattcctagtctgtgcacctccctgactgctacacttgctatggttcttcatttctccaaagactgaagattattctcagtatctgcacagccttagaaaaccccattccctaggcctgctaataaatcaatattcagggagttttaaagacctctgtaagggccagacagcacctagtactattattttctattcaaattttcatccctattccagccaagtcccaatgtcccatctttggacactgtcccatcaggaagatcctgctgtgtctcagatgcaagtcatcttgctagatcttagctcgcgtttcctacaccatttgcattgtctgtttcatgtgtctctggattccaggctgccattggccctccactatgtgtcccagtgctggcattctgccctattctgacgtaggccatctatcagatggctgactcagtcttaactttggtgttcaccagctgcctgctttcagagctgtctctggtttgctctgattttaggccaacccccatctcataccagagcaggtacggctctggggatggctggatcaggtgcaagtctgaagtgagagaaacccagtgaaggtcaacattgtctacagtgacttagaatgcaacttacaataccatcaccaataacatcctcttgcattcagtactttgcaatttacaaagcacatttatgctcactatctcatttgctcctccaacaattttggaaggtagacttaagtagctctgtttaggctgggcacagtggctcacacctgtaatcccagcactgtgggaggctgaggcaggcggatcacgagatcagaagatcgagaccatcctggctaacacggtgaaaccccatctctactaaaaatacaaaaaattagccaggcgtgctggcgggcgcctgtagtcccagctactcgggaggccgaggcaggagaatgacgtgaacccgggaggtggagcttgcagtgagcctagatcgcaccactgcacttcagcctgggcgacagagggagactccatttcaaaaaaaaaaaaaaaaagagctctgtttaagcggtgagtaagctcaggcctagagaaattgagtaacttgggtaaggtcacacaatttttttttgaaaaagtaaaattgatggcgaggtgcagtggctcatgcctgtaattctagcactttgggaggcccaggtgggatgatcacttgagcctgggagttcagaccagcctgggaaacatagcgagacgttatctctactaaaaattcaaacaaaaaaattagctgggcttggcggcaagtacctgtggttccacctacatgggaggctgaggcaggaagcttgctagagccctgtaagttgaaattgcagagagccatgatggcaccattgccctccagcctgggcaaaagagcaagactttgtctcaaaaaaatgaaaaattaaaaaaggtagaattgaaaaccaggtctgtctgacctgaagtccgttttcttccagctatgccacagctgggacgtcagagggttattaggtctggagtaagtggaaagaagtcagctagtttgggaagagcaacaagatctcaggagacaagagggctaaggctgggagcccggttgttctaaggcactacagtgtgacagagtacaccttagagagttgggcttcttttgccttcccacttatgtagcctttaactgcgtaagaagcattgggagcctcagctataggggcttttatttctgtttcttcatttcttgtcacatctcccaggaagttctattgtgtcacagagatgagcataggctttaaaactaatcagatctgagtttaaatctttattttatgaccaagagatattgggtaagttactcagcatccctgagcttctgtttcttcatctgtaaaaatggaataaacacatctgccttgcaggggggttgtgaaaattaaattaaataatgatgcatcgttttcaggaatacttggggtggaatgacccacaaaggggtttaacttcttggccagagaaacccaatgggccttcccatgagaggctgggcccaggcctcagctgtgtcttgccttctctgggctctacttattttctggagcctcttctgttgcaagctaaatagttcctccccctcagtagagtctatgctgtttcctctggctacagactctataatgctccttgcttagcagttgcttagccaagctgggccaattaagctgcattcctctaattgttttggtggcttttctcggaactccctccaatttgtctacaaatcagttctaaatttagacccacccgccaaatcttggagctctgagcttttcactgctctagccaaccatgaggctcttctaccatcagtgattgagtttgggggtggttctcttcctctctctcttctccttcctctaattatcaacatgtaggcatgaaatgactttgtgacatgctttattttgtttgtagagtgcaggtccatattcagttaccaaacagttattcgtatttaaactcccaggaaaatgatggtagagaattaaaggtgggattaatttaaatgcacaaattatttttacattccaaaactgcacagagaaaacaaaccaattttgatataacgggggagaaaaggtaagagggtaggagcaagaataaagttatttgctctctgtgtttttgtgcctcactccctgcactttttctaccttcccagtttgcattcaccaaagtatcagcgcccccggccttggtgtgtctaacacaaagaacctgcagtatctttgtcaggtagataggaccctcccaacccccaggagacaagatttcaaagatccctattctccctccttttttctctccctcctccttccttttccttcatcctcttctcctctcttcttcctcctccatgtcaatatcaaattcattgccaccagccatcttttatgctaacagagtggcttatgctcttgaaagccttttcatagacacagtctcatttgaattgtacaagagtcctgggcagggccagagcgggtacatagactccgtttgacagatgagaaaagagtactccagagaggtttagcaacttgcacaaagtcaaacagctcatggatgagctctcaaaaagacccaggatttctggcttcagccttggtcacagctggtgctctacaaacatttgtcagatgagagaattctgatctcactgctggctaacggatcagatcaacacagccaaaggcttcatgacaggctggcaggctggcaggctggcagagaagccagaatcttccgttgtctcagagcttcattcccatcaacccagcggacacctgttgactgttcccagaaaaccactgcagacatgtttctttgttgtcagcagagtccccatggacatctcatgagtctttgaggatgcccacagggccctgcagggaaggagacatgatggctggctggaagaaatgcctccacaggtggcggagagtttttttcacctactgtagactccaagtctctttctcttagggcctcaaaggcatgttagcacatacatttaacagcaagtgcttggatctaacaatattctgagtgcataggacatgtagaactgacaatcctgcttccctgtatagatgacatgtccctgctctgcaaaatgggcctctcacttctatatatatgacttagctttttttttcaagaatcaggtgggataaggagtttaaatgagtttacaaaacagaaagttctatataaaatagatgataattctatataaaaactcctttgttgctgtaattacaataatcctagcggtaaagttgaccttaatacgtgatggaatcagcgatggaagagactttagagtcacgtttcccaacccctgagtttgtgggtgagaacacgaagctccagacagaaatgatgatcccacagggccacacagcaggtgtcaggagggatagttttagaactctgtctcccggctcatccccttgtattctgtccttttgttttggatgctgtttgtaacatctatttttcttaccttaatttctccctctttccttttctttcccaaaattcaatacgtgcagaatgtcttccaaatactccttatccacaaccttttctttctccgaatgtatctattttatgtcccattacctcacaatcttgtgatgttgctttaataattaatgaatccatgctgacaggttaaaaaagaagaaaccacaatgaccaactgtgccactccacccagagagcatttcatttcaatagacaccttcacatacctccaagaaagagaaatgactattcatgaaatttcaaattctgtggcacaccatttgggattttctccagattgcacattgattagggggttcatctcgcttttaactcatggttgaatatgtggctgccttctcttattggctaattgctctaaccttctgagctctgtgaccctgactgatggcactggatatttccacagccttgtccaaggaggcctccaccagcagggctggtttctgacacagagtgtttgcaggttattccatattctttgggtcaagaatggagcttgagcttctttctgcatgtcagtaattagacccaataggttcccagtgagtgtgcatgaaattgaagggtggtgtttcttcaggatgtgtttcctgggtgaagactgtatgtgaaaatgtcagggctggtatcaaaagaggatttaaaaagaaaattttactcaaggagaagaagcaaatggacagacaattccccacttgatgtcagtcatctggttcctcttttccttcccagctgggtcatggactttgcatcttttcttgcatgtatagagcctattacagatcctgaaatttcagtgttcagtgaataccagtgctgggctgtaagacattggtgcctccaggacaaggaaggatgtgccccacaatcaaagaagggggacaagaaagaatgagatttcagaacttggaggacttcatttcaacagttttggaaattacctagtctaacctccctcaactactttgtcagggagtctgagactgcctatagggtatgcaggaatgtgtcttgctggaaacagatagcaccatttggactgtgtgagtgtgcatgcaccttacgcaatcaacaaagggctgcgcctgtatgcacacatatgcccatcttctccacagggtggacaagcccaggacaagcatccttctctgtaaaatggagccttgatatctgcactgtttacttcacagggttgtgaagagggtcagtaagatcatgctttgagacacataagaaatatttttttgaaaatgtgagtgaaaccttggtgtgcatgggattaggtgcacaactagaggaagctgtgcttgctaagaacaggcctattttgtggtctggggaacaaaagatacctcttgccctcaacacacaaccctgaaggttggggaggccacagccagctgggaagggagaaaaggagcctgatgaggtatgtggatgaggaggttgtggtggacaagaagggatggccctgtctcaggacatgtaggaggctgccttatcttgaacattctccagaataacgggaggtcacctggggtgctgaggtcctcaaggccaccaggtctggggctcagaactaccggggctgagtgtttgtgtatgtagatgacagctggcagatgtggagtagcacatgggtaggaaaacagactaggagagtgaaagacatttggctgaggctgcataataggatgtgtaaagtgagggactgaacacaggccagtgtggctccaaacccaggatactcttcccagcatcacaaacagagcagtggaagagaagagggctgttctgtgctgaggagacctgaagcccaaggaacaggccttccctgtgcttgggatgaagaaggtagtggcctctgattgcatccttgctcctctggggagggttggtgagctctaccacccttctagaaaggatggctcagacttcccactactctcctttttctccagtttctttctccagttgctcaagttcaaatccttcctgtaacccttgattcttctttttctctccttgtgagctgttcatttgaaatatgttcagaaacttaacagttctcgccatcttcactgctgccatcttgtccaagccccatcatctctctctggtctcgtgcatctctctgcatccacccttactgcctgtcatcttgtctctgcacagcagccacaggaatccttttcatgggtaagtcagttcctgcctctcttcagagggaaaccccaaaggccctactattatttgaatgtgtcccccaaagttgatgtgttggaaacgtaattattgcaggaatgggctcctgataaaaggatgggtttggcctcctttcctctctcttttgtccttgtgatgccttctgcatgttatgacatagcgagaaggtcctcaccagatgcaaccctttgacattggacttcctagcttctagaaccatgagccagagaaatttctgtttattataaattacctggtctgtggcattctgttatagcagtgcaaaactaacacagaaaattggtattaagaagtgtggctattgctataacaaatatctgaaaatgtggaaatggctttgggactaggtaatgggtagaggttggcagaatttggcaggtcaggctataaaaagcctatattgcaataaatgaagcattaacccatttatgcctgaggtggcaattttttttaatttttgcaatcagaccttggtgatgaccttgagtgctaggatataaataactaccacatgcttagtgttccaataatggaacactaggcataattaagggcaattctggtgagggctcataagaagaaaaaagtcatagggaaagccaaaatcttagcaactacttgagtagtcataatcagaatgttggtagaaatatgggtggtaaaggccattctgaagaggtctcagacagaaatgaggaagaagacattggaaactggaataaaggccatcccttttatatagttgcaaataacttgatgacactgaggacaatggactttgtggaaggcagaacttaggagtgatgaactaggatatctggtagaagaaatatctaagcagcaaagcattcaaggtgctgtatggcttcttttggccacttacagtaaaatgagagaagagagaaatattttaaagatgggatttataattaaaaggaaagcagaaaatacaaattttgtaaatgtccagcttggccacataaagaatgaaagagtatgtttaggaaagcaaactagggtgtatacaagtgaccatttgctaaagagactaatagaatagaagggaggcaggggctatttaccaaaagaataggagaaagaccctgaaggcatttcagaggtcttccaggatgtcctttccatctagggccttgagagaagggtttccaaagaagtgcccagaggacctcagcattcactgccctgcaccacctttgggactctgctccccacattttggcacagtactctttggttgccccagctgtggctcaggcaggcccaagtgcagctcgtactcctgcttcagaggtacaccttggtggtgtttacagggtgctatttctgcaggtgtgcagaaagcaaagctgtggaggtatcgtggcctctacttagatttcaaataatgtattggagagcttgggagcccaggaagagaacttatcctggagttaagtcactgcagaaagttcccactagggcaattcctagtggagtcatgggcatggggtacccagcatgcaactccagcctgggaaagctgcaagacaagactccaacctgtgagagaatgagtggattgagcctagcacagccatagcaatggggctgcctgaggcgttaggggcccaacctccacccttgtgtgcccgggatgcaggacatggagtcaaagcagattattctccagctttaagacttcgtgttttccctgctggtttttggacctactagagaccagttacccctttcttcttctctatttctcccttttgtaatggacatatctatcctgtgcctgtcccatcattgtactttgtaagtgtataacttgttaatttcacaggctcacagcttgtctcaaagcttctcttcaaattcacagaaaataatttatctcaggacaaatccttgggtctcccttatgtctgatttagataagactttggagtttggactttcgagttgatgctggaataagttaggacctttgggactattgggatagaatgaaggtattttccatatgaaaagaacatgaatttttggagccagaagccaaatgctgtggtttgaatgtgtcccccaaagttcctgtgctggaaacttaatccttaatgcaacggtgttgagagatgggacttttaagaggtgcttagttcatgatggctcttgcccttgtgaataaattaatgtcattatcccaggagtaggctcctgatacaagaatgagtttggcccccttcgctctctctctctcatccatgtgatgccttccaccatgttatgacacagcaagaaggccctcaccagatgcagcccctcaatcttggactttccagcttctggaaccatcagccaataaagtttctgttcatcataaattacccagtctgtggtactgttatagcagcacaaaataaatagatgcccccacccattcataggacaaggccctcaatgagctgcatcacccacaaaagacctctctggtctcacttcttcctatgcccttcccctgtccttgctcactggctccagccacacaagcctctcctgtctcaggacctttgcatggactggtccttatacctgggtgtgggatccacttgacttattgctatagctctagcaatggggcttaacatgggttcaagaaatagctgtggaatgaagttcaactctttctctcatcattctttctaccttgtacctttttcctcagtgttttatcctccagagcccactctagaatcctcgcaggggctctaagaggaaggcctgagccctttcccaatatctcttatgcagagagggagctggagggcacagagtgtgaacattttcaaaatcccatgccagtcttcctagctctgcatttccccaccacctccagaagccccatcttcctctgtgtgccatgcttttctcagccctccaggcaagagtgatgaagtcactgttgttattcactgtgactggttgtcatggcaacagggccaacacacatccacagagcccccgtttagtgtgcaccaggggtttagcaaggtggcagtggtggtggtgggagtggtgggggtgttgggctgcttgtatgggtttccccactaaggaggcatctggggagagagcctgattgggactccaggacagtggcatgtgcttacacactgcttggaaggagcatgatcccaacacaaaggcaccattaactgcagagaagcttgcacaggggccagctagttgcagcccctgggaaaaggtgctttttggatcatggcctgataggctctcttcctctgcctgggacttggctgatctggcccagcacccagaagagaagacagagagagaaacagacaagagagaaataaatgcatggaaaagtgaggacatgaggccactcacctgtttaaacccagatgtgggctcttgttaactgctggggttgggtcagaaaaggagaagtcaaaactggattctagatccttcccctgagataaaggactgacccatctatatgagttacatattagttaaagtagtattaactgctgtaaaagataaactcctagatttcagttatttaacccaatagaagttcattccccactctacacaaagtctaatcagcattactgaaggcagaaggagtggaagagtgctcagggccccaggctgataacaagtctgccaaaatcaggtggtttccaaggttgtcttggaccttggcatccagcagacagactgtgaggaaaagcagagggtcacgtgggaggttttcaggactggtctgaaagtgggctgcctcactctgcccacatcccattggctggaactgtcacatggccctacctagctgcaaggcggcctagaaaatgtagtctagttatctggtcagagtctctgctgcaggctgaaagggagcctggccctggaggctgtgtcaaggaaatggactagaggtggacattgcccacagccagacaggaaggggcccccaggcatgcaaaaaatacctagtgataagaaccattcagaattagaatccagattggcctgactccaaaatctttggttgtttgtattctgaggcttcctcctataggaacttcctggattctgttgaaaggagaaaggagagaaggtagggaagaggtggagtggacatggagagcaggtggtgatgaagtgtcagcctggtctagctccttgggtgccctgtaagctttgcccacgtttaggtgctcatgagggtttccgctggaaactcccttaccattccctttgaagctagacgagaactcaggttaatgtgcacaacggtggcatggcaaacagttgtggagcacagggatggaacacaaatgacagcacaacagaatccaggaacttttggtccaaactgacagggcattccacctgaggggtggagtgaattgggtcctcagagaaagaggcgagggggttagattttcatcctggaggtggctggaggaagagcagcccaggagagccaggtagatgggcacaggaaagaccgctaaaaggagaggatggaggggtctcagggtggaagggaggcccatgtcagacccacctaagcctttggtgtcaggcttttcaaaggtggggcttcagtgtgaaaaatctcccccctaaaactcgttctttccctgagtggtataatgaggctcagaaggaggaattaggatgtttccaaagtcacaaagctagttagaatcagaccccagcctagaaccttcatctcatatctcctgggtcagtggttgttctacttctataattgccctacacacatatattacttcattctctctctctctctctctctctctcaagttctgaggaacccaggtagactttgaatctccagcagaaatcctgacactctgacagttggaggctgatttagctgcatgttctcataattgagtctgtaacttgcacagatctaatccatatttataatcttacgttgggcaagtgataccttctgtgtctgccggcatggcaagagccctggctgcaggttgcagtgcagaagcgggtctctgctgcagcggggagcccaggaaggaagacccgtctcatctctgagaatgacagtgctctccctgagtagctcctgtgcagggtctgtttaaaaaccctcagtgatatgcaaaaagagggtaggagagaagttgcctgatctaaattatataaattctgaattatagagaacttttaaagatagtagtttttatcactttcaaggcattcaggaaccaaatggacagataggaagcaaaacaagctcaattagaggcactctgaggaccgctttaatgaatagaaagaaagtcctgtgtaattaacatgctttatgctgctaaactggtattccatgtgttgaaagctacctttttaaaaaaagaaatatgaaattatggggtggcaacaatgtatactattgctctgcatgaagaactctgatttgcatgtagtaaaaaaacactggccgagaccagactatcaacagcgctaaccaaggagattctagatcccgctgcaaaccttagacacagcacgtcctgcctccggcccccagcctcagcccaaactgggtccctggcagccttgccatgcattcatgctcatccccctgtcttagacatagcacccttttctagcatgctccccctgtccccactgagtctcgggcaagcctctgaactcaccagctcccactttcctggggtgagtggcacaggcacaggagatattacaatgacacagccgtgagactgccattgatttccagctctcagtctctgctttaatccatatttttattaaacttttttgtgcaggaaggaatatttagggaaaaccatgaagggctgtcaggcgctgttattagtcttctcagctaccaccaatgagctgttccaggcagaaatatttgccatcagacagcggacccaggggccagcttggaagcagagctgatttggccgacagaaaggagaataaaagacgattctcgagatgccaggaggacaatgggagcagcagtttccaatttatttcacttctattgaactctttttagacctcagttcccacatctggtgagttggcgccatccttctcttagaattactgaggcttattgctggggtttagagagcatccaaatcactccacacagctttatttggacctttccaggtgtgaagcttggggctaggtgctgaaatacagaggcatacgggctccacagcagttcatgcaaaactcctttcttccactagagttcaaggctaagtctttaaagatgccccctccaacctaccaccttggaactgcttctatttttatgtttattacagtattaatgtggtctgtgcttcttctccaactacactgttgagggcatggcagtgtctatgtatgtagcatagtgcctggcagatcctggacaccaagagcatatttactgattcatgaatgaatgaatgaatgaatgaacaaatggcttaatgcaccacactgaaacattcaaatcctgtagtacatgttgagaaggaggagggtatataccaagggaaggcaagatgccaacaaagggggctgagaactccaacccagggtctggaggtcctgaggatctccttgcttctttcacacttccatccaatcccattctgtggtcacagtgcctcctaggctcatcctagtctatgcctctgctgattctccaccagtgtgggtgttgcagagcagtaaaggtgtgcagtgtgagaacagcagagctattctctgggggagaggttggaggagcatgtaccaagcccctgctgaatccctagtaccaatttgacccagtggctgagcatcctgcagaaaatcaagacactcctgatcgggaggagcattaattaggatcacaggacccaggggcatggaacagcctgagcatgttttagggagcagaccaataaaggccaaggaacaaggtaggaacaacaacccagggtgtgcaggatagcttataatgctctctgcccaaacgcaacctcctgggggaacgtgagcagtgagcaatgaataaatcgggaagaaacatcaaccctgagggtgtaaggcagggaggaaactcacattagggaccacctactagggccaggctctgggctcactactctggatgcaaccccagtggccccctcccacactccctgcactgatttggaggccaaagtctcttctcattacacccactgcagcagaatccggcagtccctagaggactccgaggcgatctttcgaaagctgtttgctctttcccttgggaaatgggccatggttgtatttttctttctcattttctgtgtgggaatgataacagtaagaatgatgtctacatctccccgatgagggaaacagtggcggcatctgtctgtcactgatccctgccttgtgactctccatcagctcaagtcataggtgactttcattcataaagagagctgccctagactctagcaaaggagctttggaccactcactacagaaatctgagcaaaattgtggctgagaatgaggctacctgtgacccatctgggcaccgcattcttagaacatcagcaatcaggagtgtccctgggactcaaatgaagaccctaataggaacttctggagggactgagctagtttaagctgcagataggaagccttcaacctaaaggaagtgttcaaccggaagactttgccttcaacctaaaggatcctacccatgggctgtcaggacaagaggaatggggcttactccatgcaacctaacggacagaagcagagtcaacaggtggaagttataggaaatacaatcgggccaaggaaaggaaggtattgggactctcaaaagatgggctcagcatgatggcagcttgtgtctctctaagcagaacaccccatgagaatggcgttacataggcttcccatgtgcttatttcctttaactctccacgttcccatgagaaggatcaagctcacactattgcccttttttagagggtgagtgtgaggttctgagaggtcgagtagtagaattatctcccccagtatggggtagatctgggtttgatcccagtctgctgctccttccagtaggccctaaggcctagagttcatataaaagtctcaggaatgttggaagagactcatatattttcggcatctccaactgtaggtcgtaggaatccacacatctaggtatgtggatttttaactgggtgaactcagttctggccacttgactgccctgagcctccatatccttatatgcatggtggggtggaattgccttcctcccaggattagtagtgcctgggggggtctctgagacccaacccaggatgatacagtgctgggaactctgggattctgtttactctctgggcaccagttgagaagcaacacaggtctcctttgctctaagatcccaaagatttgaggaagaggagagcttttgtgctctccttgcctctctgaattaaatgggtatataataggatacagagcccttcaccagtattaagaacttccttacttcttctgcattcgttcttcctataccttacctggctcagcctaattttatttccttccaagtcttcttaatgtatatttggactttggctctttagcccaaagacctaggaaatgatgtcattatcctctagttctaccctggcaattctgctaaagcaacaggtatcttactttttgtctgccctgatagtgagaatcatggggcagtgggtgtgaaggaggtgggggcacatcaggcaagctcttcacaaatatcatcctgccacaaagacatgtcttcactctatgtacttacttctccctatctctttggacgctgttgtgacttaaccatcatctcccacctgaactactacaacagaattttaaaagctttccctcttagttccctccaatccattttcctcagggatgccaaatttatctttgtacaaggcaaaactgtgtcatgtcaatcctctgcttaagagacactgacggcttcccaatgcacttgggataaaccacagaatccctgcctgctcccgctccactcctgcagcctgtctaaactcatcgtgactgccctcccgcttgccctccgagtcacagtcatttgggcctccctccagttcctcgagcacaccaaggacattccttcacacatgttggttcttcttcctggaattcttcacatcctgatcctcccgtgtttcctccctagctcatccttcaagcatcaggttaaatgctgcccccaagctcaacccagtagaagccttcctgcaaccccagtctaaactggatctcccctgaaattccctccctcttattcttcactgattttatcatagcttggagttaagattcattttggggtttggttgttccttccaaaatgtaagctctgtgaagcagacattgctgtcttttcagccttgcacctgttaaagaagctcaccttatctgtggggcacatgaagaagaaaggagagggagaagaaaaaggaaagggaaatgacagtaaaatgtagaagggagagaagagtaggaaaagcaagaaggataagagaggaaggagagaggggttgaggaaggaaaaagaggtagaggaggggaggggggaaaataagaaccagagtctctctagctggccacaggcttccccctcctcccggtgagcagcctgggagtcggcttgattgctggcaccctcgcctgacagatggagcttgtgcacccaccatctctcttcactgggaccctggacagaggcgcacacacacacacacacacacacacacacacacagatatatgcacacacaactggatgcatgccttgagtctgaaagaagcagatgcttattctttctccctattttgcctctgtttttttgagacagagtctggctctgttgcccacgctagagtgcagtggcacgatctcggcttactgtaacctccagctcctgggttcaagcaattctcctgcctcagcctcccaagtagctgggattacaggtgcatgccaccatgcctggctttttttgtatttatagtagagacggggtttcaccgtgttggccaggctggtcttgaactcctgacctcaaatggtctgcccgcctcggcctcccaaaatgctggaattacaagcgtgaggcaccacaccccccaccgcccattgccccgcaattttgcctcttaacctgggctcctttccctaatggtctgagtattatttttctttttttggacataacaaaaggcataaagaaaggacaggacgcaattggaaggtacaccatacaaatgatgcctagcctgtcatcccaacactttgggaggccaaagtgggaggatcagttgagcccaggagtttgaaaccagcctgggcaacaaaaagagacccccagattctgcaataaataaataaaaaataaataaataaataaataaataaaataattaaccaggcgtggtggtacacctgtagtaccagatccttgggaggctgaggtgagagaattgcttaagcccaggaggtcgaggctgcagtgagctatgatagcaccactgccctccagcctgagcaacagagcaagaccctgtctcacaaacaacaacaaagaaacagaacaaaaagttcccacacaactggtgcctaaaaaattagcacagaaaccctgtaattccctccaggcatctaggaatctggtggaccagcagactgatttctgggaattggtgtggtggctgagcaggaactcacaatctgctaaattccccagacttcaactaatcagggaggtgagagaaagcttcttagacctctgctttcctgctgctagctgctgctttcccaactagccctcctggtgctgcctggtccccttccctttccccctctcctgtccagatttaaacaccagcatctctaagcctcagagtcctggtctgtgctggatggtggatgactggccattaaaaagtactggttttggctccagaaacctgggctctgatctatgttctgcaagctcacacgcgacccttcccctctctggaatccagattgctcatctgtaagatggccttcaataaccctgggatccagaccttgtgttctatggttccagttagcctgctgatagggccccatatccgtcagttgttgctgataacaaaaaccttaaaatctcagtggcttccaacagtaattatttttatgttcactggtctgtaggttgactgaagtttggctgatctgggctaggctaggcagggtcaatccagagcccaggtcaagtgagattcaaatttgctccacgtattcttattctgatgcccagactaaaggggcagtggccatctggagcaagatcttctcatggcagatcacaggggtgtgagaagttaagctagattgtgcaagcacatgcaaaacctctgctcacatagcatccactaaaatcccattgccctaggagagtcacatgaccaaggccaactcaatggggtggaggaatattctctggttgctctagtgggaagtggtgcaaagtagcaaaaggtgtattagtttgagttcttactataaggaattggctcatgcagttatagaggctcagaagtccaagatctgcagccagcaagctggatacccaggagagccaatggtagagctctagttagagtctgaaggcctgaggaccagaagggctgatacagtaaattctagtccaagtccacgtctgaaggaagaagactgatgtcccagcttaaaggcaatgaaacagagagaaggaattctttcttactcagccttatattctattcaggccttcaatggattaaatgaggcccacccacattgcagagggcaatctgctttactcagtctactggtttaaatgtcaatcttatccagaaacaccctcacagacacactaaaaataatgtttgaccaaatatctgagcaccctgtggcccaatgaagttgacacaaaaaattggtcatcacaaagggctgatacctgtggttcttttaccaggagtgggtagaaaactcagagcaatgaactgatgctctgcaagggctttgagagattaaaaaaaatggcaaaagggcgttttggggatcctggccaaacaatgaggaagagagtttgaagcaaggattcttttcatgctctacacattttgtcacattgagaggtacctattctgggtttcctgcttggagcagagagtatcagtggtcaccagtatccctgtgctcctctacagttcccagcctcccctgcagttagattggtcacatactagtgctagcatgtgcgcagaagtaatctgtgtcattttcaggctgaggtgtgtaagtattcaccatgccatcccctttacccacttacacaatgccaggacaaccttgaagcaacaagagggaagactaattgctgggtgcagcctcaatccctgagtcaccatatggacgagaggagcacagctgcatcagattgtgtcatgagcaagtcactagaatttgggatttatttgttattacagcatggtccagagtatcttgacaaatacattgctgttgtactggctccctgggtaagtccattatctcttctgttccaaatttggactcactcattgattcacaggctataagagttaatgggaccatctgagcagacaatgcaggcaggagcaggaggagctagtgcagacatttctggtgcttggctccaaggagggagaggaattaccagagagccttggggtagcagtatatgttattttttaaaacaaaatgacagtcactagtgtgcgaatatgttgttttagtatatagagatagaaaaccaacaaaaaacatggactacgatttcccggataacccctgctttcatttaaaaaataacagtaatatgtggtagaaccttcaaataaaatagatatacaaaaggaaaataagattttctctcctcattcctccagtgcctctgctcaaaactggatactttaaacagtgtgtgaaccgttccttgcattttctttggggaaaaagaatgtgtattctttttttttttttttttttccttcctgctctgtagcccagactggagtgcagtgttgcgatctcggctcactgcaagctccgccttccggattcacaccattctcctgcctcagcctcacgagtagctgggactacaggcacccgccaccacgcccagctaattttttgtgttttttctcgtagagacgggttttcaccgtgttagccaggatgatctcgatctcctgaccttgtgatcagcccacctcagcctctcaaagtgctgggattacaggcgtgagccaccgcgcctggcccacatgtattctcttatacacatacggaaatgtgtagtcttctttatttaagattctgttctacattttgctttttgtcacttaataagacagcatcaaggtcttcctgcatcagcacccacgggtctttctcatactacttaatgcctttagagtagtctaccatatggtagcactatcatttatttaatatgacccctactgagggactctttgcttccaatattgtttgttcgtttatttttctactataaccagtgctgtagtgactataatgaatattcctgtacctatatttacagagcaggttgctagcagtgggattcttgggttgaatgggatgcatttgataaatattgccaaattgccttccccaaaattgcaccattttgcctttctaccaacagtacaggtgaatgctgtacatcctcagctgcaccgggttttaattttttccagttttgtagttgaaaaatggcatattattcttttcagcgtgagttctttaaggatgggtgtccttattattatccactaaaaatctgtttcttgagcaaactattttcattaacaggctatgaaataaatgaaacagaaaacaatgcagtgttcagagggcgtcatcaccttcagacggagctgtaccccgtcagactacccattggtgttctcaggattcctgaacttctgccccaaatcccttaactgattgcttacctggtgggttgggctgtaccaaggtcacctttttcttcttccttagactgagccaaccctgcacagccagatctgtgagttccttgtcaacaaagcaattcaaatacaggtcaagaaaatgcttgatggagatggtaccaaaatacatttctgcatcgccaaggggctagatggtatcatgtcttgagtttatttattttttgaaaacttatctgctatattttttctgattaaaaaaatacctttgatgtgaaatcaaaaaatacagaaaaatacaaataagaaagcacaaattgtttgcagtcctgccatccagtgtcacacactggtgtataggtttcttgtccttttaaacacacacccacatgcacatacatacatttaccaaaatcattagatattcttccagagggagtataacagagtggttaatagtatggactcttgaatcagatagcttgggtttatatctcaactctgccactttccagctgtgggactatgggcaagtcacttttattctcaagacctcaattttgtcatccttaaagtgcgcgtaataatagcatccacttcataggcttgctgtgtctgtcaatgcattaattacaagtcaaactggcaaatgggaagagccatataggttcttacttttttattattaaagatttcttcctcttgtatggatgtaccattattcagacccacttctgttgaacatttgatatttttccaactttttccatcacaaataacactgcaacagtcaatcttgtatataaaacttttctaactatggaatggccatttctatggaaagagaatctgagaatatggctaatttcaaagatttcaatgtgcattgccaatttttccataaaaattgtgataacttgtataggcagtacttaaaagtacctgttatttccttgttctttcaccaaaagtgggtgttattattttaaaaaatctattaagtcccctgtgccccacccaaaaacatatgattcaatagacctttttaagaaagaaaataacttaaaggaaaaaaataactggaaaattatggacattgagttgaagctaaaaccaagatatttatgtgatagaccttcaaaaatgaagacttctaaggttaacttgaaggactcccactgctaagaggctaaggtcttggttctaatatcatgaagaacataaaacaccctcaatttctttttttagttttaattttaacttctggggtttagatttgttacataggtaagcgtgtgccatggtggtttgctgcacctatcaacccatcacctagatagtccatgaaaacctttagtttttagatttttcggggattatggagaatacctttaaaataaaaacaatgacactaaactgtaaacagctgatcctggtacattaataactcttgaacttcactactctctgggggcataaccttggccaagccacatcccccatcctcttatgtgcaggattctagtgaaggaaggaggcggggagtctcagactgggctctcacggatcccttctggctgtaacatttcaccagcctgtactacctgagtttacaaaagagattagcagtgtacactgcaacccattttaaatcatggcctttgaccagtacatgtaattggagacactcttcaaagtgacaaaatgcattagcaggtcttggctctgctggggtctctgttacgaccagctgtcagcagcaactgcagcagcacttgcttcagcaggaaagtctatactgtgtggaaccaccccagtttttcatctatgccctttcttctctgggtccaagaaatcaagtcttctccttcttcttccaaatgagaaagtatttgggggtgggtgggggggtgggatgcaggtaccagccatgttcaagacagagcacctgacacagagaacaggagtagaggctgattctaaaagctcctgatgagcagcatctcccagtgtatacgatatatgcattcgtgaagccatagtttaatgtggcatagcttggtgtttccaaatgtgaatcttggagccaaacctctttaatgtgaattctgattctgaacttactactgtgatttgagcaagtcacttaaaccctctgtgcctcagtttcttgtagacaaatccatatttaacttgaataacctagttgactgattctcattctcttcatctcactgtagtttcagttaataactggacatgctggatattgcctgttaatacccagtatcatctcgcttttctaaaagagatctccgaaactcaggggctagaagcctggaaactgcatttcccagactcccttgccagcagagattctgccaaggagaggctctttgtttgagatttctgagatagaagagcagaagaaaaataccattctttagcagcagttgtgtgggcacaagtgtggccttcaacagatagtggatatggtttttgccagggcttttggacaccctcctatagacattgaaatatgtactagctttcttgtgatttccacatttccacattttgtgaaaaacaacgatgcctctctgacctctttcctcggccctttcaagggttgtgtaaacctctgttgccctatattaaatacattcctgtttaaaacattaaagaggcttttgtttcctaacctaacatttgtgaatacatcatatattctctaagtagtaagtagaaagcaccctaggcttagaatttaaattcctgggtttacagcaatcccattattgggtagatgcccaaagaaatattaattgttctaccataaagacacatagacacatatgttcattgcagcactattcacatagcaaagacatggaatcaacctaaatgcccatcagtgaaaaaatgtggtacatatatactgtggaatactacacagccataaaaaggaacaagaatatgtcctttgcagcaacatggatgaagctggaggccattatcctaagcgaactaacacagaaacagaaaaccaaataccacgtgttctcacttgtaagtgggggctaaacactgagaacacatggacacaaagaaaggaacaacaaacaccagggactactggagggtggagggagggaggaggggagaataaaaaaactacctattgggtattatgcttactacctggatgacaaaataatctgtacaccagacccctgtgacaacacgatgtacctgtgtaacagacctgcacatgtaccccggacctaaaataaaagttaaattatgcttctttataattagcttagatgtttttatatgaaataaatggtacttgcataatttttaaaaaacacaaaatagataagttcctgggtttcaattccacctttgctgctgaaaatccatgtgaccctgggaaagccatttagttttttcatcttccaaagaggaataattatatcaataattacgtgtttataaaaaatatttgtcccgattgcttcacaagattaattgcaaaggctaaaggggattatggatgcaaaagtatgtgctaaactgtccacatttttacgtgaaaagggagttactattttgtcatctttccagagtttctttttgagaaaatgaatgctcatgctgcacattagagagtctagtagactccttctcagaccaatagttgattgtgcagaaacctggggatggataacctagttatggacaacctagttatccatccccaggaattcaagccactgtcgaatccatattctgcttgtatgacaatggactgtgattcatactagttattcagttctccttggtttttgttgttgttgtttgtttgtttttttgagacagagtcttgctgtgttgcctaggctggcctcaaactcctgggctcaaactatcctcctgcctcagcctcccaagtagctgagactataatcatgagccaccacacgtggctcaatgctccttatttttaaccaactctgaagcctccttgatgaagccaagtgtatacctcagctgctcattctggaatggtctgttgaattagtagagaatatgtccaaagccaaaaacaaagtacaaagccaatgggaaagaaatcaataattacatgtttataatttaagatctgttttgtttgacacagtgccattgtggtaccagccctgaacaatgtttgcattctttctcctcctcatccatgtatctgaatgctgccacttacgctgtggacattctgagccttggttccctcatctttcatgggtcacgttggctctgtaattaagtccaaactccttagcctggcataactgtcctctcatgatctggcccttgctgctgtctcttcatatttgtcttttcctactttatgagctcaccctcaccaatgcccaaatattttattaataagcctcatctgtgctgagttacttgcagttcctcaagtacaccaggctctctcatgagcctggccattatacatgctgttcccatggcacaaatattctccttttattttctgttttggaaatccctaatcattcttcaaattccgggcccaaaatatctcctgtgtgaatttttcctggaaccttccttctccttctcctgtgatctcattacactgtgtaactgaaataatgtatgatagaccataaggcatagaaaacagcactgaagatcaaaagaaaaaagtattagaacaaaatatgtagggtaggaggtttgctatacacaggtacttgaatcaaagtacggatgagtcaaacttgtctgtaaatataactgttttttagattcagtttcaataataatttaaataataatgggtgctttggctttaatcataatttccatatactttttatttgtactcaataataatttcaacaccaattcaatttcaacatatgaagagcttcttctgttaagctcctaaaaatgatgtaccagaaaaattatactcaataataaattacttctttaattaaaaaacacaaggttttaaggggaaaaaaggtgcaagtgcaacatctgaggtagcggctgctttgattgtaatagaaaaggattcaagggtaaggttggagagagagcacgaattcacagaatcatttataggcaagtgattgcagtaagaaatgaaagcaagcagtaacaaaaggccacagattccatcaatgtgcttacatttataaaaacaagagcttgaaaatagagtcaatcattaggatgctttgtaatgagaagggaggtgaccataacatctcttgccgcacagagcgtctctgattgtgtcacagcaagtcctcaaaacagctgctaaacttacagcagagctacgttcttctgtttaaaaagacaagagttccacatttgatgaccttttctgtgatgacaagttgctatcaggagtatgcaacctagcagatattatttgaaaaaaaaaaatctacatttaatctgttctttcaaggtagaggtgacattttaacaacgcatgagagagcaattgcgtctcaaaagaaagccgtgcaatgcagacagcatttggaaaaatggatgtttggaaatattgcgattgttatgtgactttattgctgtaaattatgtgtctctcttataaaagttttcatatgtgtacactccaaaaacatgaaaataatattcttctgatcctctttaaaatcccctaaaaggaaagtacctgtcgaattttgaacctgtttgttaaaaaatgtaaaagtgcagtatctttaattatttatcagaaaaactaaacaactgatgggctgttggaaaatatctgagtagaatgggatccaagcagaggaaaatgaaaaaaaaaaaaaaaaaaaaacacgtcctgcattttccatactacacctctattaatacggccaaaaagcttaccagtaatgcagccactatacacagttgatggcaaagttcctctaggtctctactccaccaaatttcagcaattcgtttttaaatttaggcaactcgtgacggactcctctgtataatgtaaaaatctcctgtcaataaagtccatttgtctgtatttaccatagggatttgggattgctttgtgcagtgttttctgaagctggtgaagtttccagtggaatctagtgacagcctgtgagaagtgaaatcatccttattttagagcttccccataaaattagcaactttgccatttttctgtagagagattgatttttatgtttctcaaaaacaatttagaaaacatttttaaaactatcgtttcatctgtagccttcttgtttcttatgaggtagaaaagatgattcttgatgaaagacatctatttgaatggagtcagactgtaatgctcagtaaaactaggggtaatgtgccttgaatttcttcttcaattaatttttaccttttatccatcttgtgaatcaattctatgcccattccagggcctcccagaccatgcacccccagcccccacagcctctccagcctctctgagcccgcccccttccaccatcactcatggacccgctggccgtccttcttttcttgcaccgcatacttatcctgtctcagggtcttatccttgctgtttcctcctccaggaatgctcttcccccaggtattcaagaggctagctgcttctcattgagagctgaactaaagtgccaccttttcagggccctttctcagctcctttccctaatgcagcaccaccccagccattcccatcacatcgtcttgttctacagtctcttggtcttagcctgtgcatgtgtttgttaactagttatgagagtaatataactataacgtaagtaatataatagaatgtaagtgctgtaagagtccagaccttgtctatttaatttaccactgtaccctgaatgcccacaataccatttggcatgtagtagccagtcagtaaatgtttattagatgcataaagaaacaatactgcaaatgtctcaggcagatagatccctcttcttcaaatagaacggggcgatgtaaggagtcgcagatgtgtaaggtccattttaggagaattggggaagtagtgctcgttagatggccagtgtacgctggttcatcctgataggtgtatcatcctccccacaacccatcagtgtaggtgagattgactcctttgaccagacaaggaagcgtaagcttagcaagttaacacaggtagcactggagccacagagctgacacctggccaggctgtgccttggggtcagtgtgtcggaatcaggacctgtcttctttctcctgcggttttctgaacagcacaaagatgcagttcctgggggcctctgtcaccaaaatgctagggttcaaacgtcttctaattatcctccactgatcttctactaattagatcttctactaaatttcttctaaatcttgtagatttattttctaaatcttccactaaaatcttctatttttctgtgactttaaacaaggtattgaatctgttaagttgggatgataatagtacctaccttgcggttattgtgactagtaaatgagaggatacacattaagcacctagaacagaacctgaactgctaggtgtctcaataaatgttgactgttggcactatgatcactatcatcattgccataagtcttattgtttctgaagcatttctctccctttcttcctttaataaatactcttcaggatcctactaggtgcctggcactgtgcaaggtgtctgagataaaaggacaagcagaggacaattttaactgaaggtgatgtgtacaaagtgctacagaagcttaagagattgctgaaaagctttgtggagcagttgacatttgagttaagcctttaagtttggagtagaattcttcaagatggagaagccagggcaaaggaaagcataaagaaacttctgtcgggactaggctttaggattgagtcaagattttccatgggaaaaacaaactacagtttttttaaaaaaagacacacacacacacagacactcactgagagagaaagaatggcagattggaagctgagtgcaaaatatggctaaattctacctttcaatcatatattaagtctagtttcatggaggcaatattctttgagaggaaataacttgggttttgctgtcagacagtctggaggcaaaatggcaactaagctatgtgtctttagacaagtttatttacctttctcatatctaggtacattacttgtttaaagaaagatggaaggaaggtagatattctcatgttataggatagttctaagaattaaatggaataacctatataaaaatgtctaatcagggcctggcaaatagcgtatgttcaataaaatgtctgctttctttcttccaaaatacagctgcacacatactgaccatgctgtcaacctgaaccgaacattgccagactagtcattgtttacacatttaacaaaattaagagaacacaaccacttaactcagttatcagtttaaatgagaagcaggattttctttcccaaaaatgagagcccagagaagttggggcctctggcactggtagttcattggtcgaattttttatttggacatttatttagtgcctgccaagcaacagagacttgggcgattgcttgcttttattattcattgatcccttacaacaagcctgagggtgggaagtctcccattttacagatgaaggccacctaagcttagagaagttaagaaacccacccagggggtttctggcaagtgatgactccagggctggctccaagagttctgtaattccaactctatctgctcatccaggatacctcttgtgatatcgtttttttttgtttgtttgtttgtttgtttgtttgtttgtttttgagatggagtctctctctgtcaccaggttggagtgcagtgacgcaatctcggctcactgcaacctccacctccgggttcaagtgattctcctgactcagcctcctaagtagctgggactacagatgtgcaccaccacgcccagccaattttttttttttttgtatttttagtagagacggggtttcaccatattggccaggatggtcctgaaatcttgacctcgtgatctgcccgcctcagcctcccaaagtgctgagattacaggtgtgggacatcctgcctggcctcttgtgatatcttatggtggtaaagtaataggacccgaacagctatgaagagcagagctagggcaacctggaaatgtccatgtttcttattttttccataacagaacactagtcatttttgtccatttctctatctgcctttgtctctcagtgcttctttttcattctgtttgtagtcatgtgcataacattccctaactacattttttcttctttttctctactccaggtagagaaactgaggctcacaatcctagagagatagtccaagctgtatgtagtatttgacttggctggaatccaaggctccagccccccaccttcccatctgtcaccctcctctgccttctctctctggtgtcagacgcagaccttctgcttccttgcctgccagtctgacgcattcttcaggcccagaaccatttagaaataattattttaaaaacaaataaactcttctttctgtgatctttactttctgttcatccacaccaagctgtggctatttttactcaccctagctcctggcaggtctttttggaaagtcaccatgacattttgtgctgcttggcctggcattcatctagaatattttttcgaaaacatcctgctctggagaaatgtcagtgtttatggtgcatccagagggatatatcagcagaagaaaagatccacttaagtaagtcctagcttgacaaggagtgggtttggaggcagacacacccagaagtagcaaagcacagtgaggcatgctggaaagagatggtggtgaagatccatgtctgtcgggaggtcacctggtgaaggtttgaagaatctggaaaaaggatggatacacagactgaacagtagttgggtgctcaagcgaaagcagggaggccgtcccaattagtgatgtccagctggtactgcacttggacaagtcacgttttctccttttctctattggaggcctcctcttgtatcaggtatgggtaaggattctaggacaaacatacacagtatccttcttactgatgctggagaaggagcgttggaagaagagtctcaggttctagtgctggctttgctgccaagtagttgtttgatcagcagcaattcacactatctcttttggcttaattcacattatctcttttgaataaagtggggcactggatggtcacttctaggccttaagttctttgagtctaagacaaatgaagatggttgcttatcatagggctaagcatttggggtctaacaagtcaaagggaggtcattttcaccaatccaagcatccatcatacatctgttcaccttcactaagaacattctatatgtcaagaactaagctagcactatggaattgatttaactaaatacctatcttcaaagaatacattgtgaaaaggcacgatagccagcatgactctcagtgagcactgcctctggctagtgacacccttgtgtggatcccttcttccttgtaccaggatcagtcttgttgatcaatagaatacaacagaaaaggtggtatgccattctgaggttttgttatcaaagacaatgtggcctctctgtctatctatctatctatctatctatctatctatctatctatctatcatctattatctatctattatctgtcatctatctatctatctatctatctgtctatctatctatcatgtatctttatctctctttcatctcttgcagtagaggaagtcagcttcatgttgtaaagatgttcaggcagcctataaagaggactacattgaaagctggtctccatctaacaaccagtgaagaactaaggccttccaacaactacaggagtgagcttagataagtatccttccccacttgagccttcaaatgactgcagccctaaccaacagcctaactgtaacttcctgaaagaccctgagccagaatcacccacctaagcagctcccatgaaaactgtgagctgataagttattgttttaagcttccacatcttagattaatttgcaacacagaaattgataactaatacagaagagagattaaaacatggacctatagagttgtcacacaaactttttgaatatccctaaacatcaaagacataaataaaaggtctggtgtccactttcagggaatacacaattgaaataaaaagtgttataaagaaataaaattgacaaatctgccatgtgagttttaaggagaacaagctcatggccagctggagagagagtgggaaatctacactgcttagcttgcagacgcttcatgagtatctttgaactggattctgaaagatgaaagagatttggaggtgcaggtggaaaggtattctgaatgtcaaggtccttgtaagccaaccaaccaacctcctcttagatcaggcattggtaggaattccagggcaggcatatacagggcctttcatgttggtggtggaaaaggagaattggaagaagattctgaggttctagtcctggctttgctgccaagtgattttttgatcattagcaactcacattatctcttttggcttctgtttttgcagctgtagaatgcagtggggcactggatggtcacttctaggccttaagttctttgttaacttaaggagctttgaatgaataaaattggatgtattcttaagaatggctggtaatttaatgtggttggtaagtatggaaaaaaaaggactagaacgtcgtgcaaagatgtgagtcctttttcctttaagccatggttcttaagctttaattattcatttaccacgtatgttattttttaatgcaagtataccatatatcataatttggttaattattaaatttagattcactagcttttttaaacattagttttgcctttgaggacaatattcataaaactatgaatctgctaggctatttacattttttctaataaacataaaagtgaacagtcactatttaacgaaatgcgctcttctgtgtaccacctgaaatccttcaatagtccagcagtggtacatcatgctttgggaaacaccattgataacggtgtcaggggaggggatgccctaatcgaagctgtgtttgtgtggagtcagctggaagtcaccctagaggctctcctcttctttagcactcctgacatccaatcaattaccaagtccagtagatcctgtctcctaagtaactctttatgccccttgctctcactccctcctcaacttcctgggcttaagttctcatcatttgcaacatgcaccatttcagcggcttcctgatttccagcactcaaaccttgcccttcctctgccctatgaacacaattctgaccatgtgacttctttgctcaaaatcctttcccctcaccttcagaataaaaacacacactccttagctttgtgcactgggcccttcagacttgagactgtgtacacctgtccagtctcacttctggccctcatccaccccgcatcaacacatgcacaggcacacttcagcctccaagaaccctgaaggatttgcacttccctgagcaagactgttctcacacatgtaaccttgtgtctttgaaggaaaaatgctgtcatcctggaatgccctcccttcctagtctgccggaacaagcctcctcatccttaggggttcagccattccagattccagatttctctctagagacacaggcatgtcttccctggagcaaccatttcactgggtacaaatctctatcctaccactctgtgttataaatgcctcttgatatcccaaatccagtgctaaagtgtgaagacagagtttgggtgctttatttattcctttatctttgatgccctgcaccctggtgccacccaataaatgcttctcaaataaatatgtggcctgcaggcgtacagaggcaagtctatggtttggctagaaggggaactaaattccagctccctcctgctgctgctcctgccactgatgaaaagtgtcttcccaacaggaagaatgaatgagccttggggcggtggtagcaggtgtgctgaactctggctaggtctcctcaacccctgaaggtgaggccctgctcaaagcttcctgattcctgttaagttcaatgttttctgacagacacaagccaattagctgtctgctgctggcggctggtttattcaacatggtttgctgttttgatttgaaaacctaatatttttcagggatttgatttggttccactggggagcagagataagctgttcagcctcagccgctgagctggctctaatggccctcattcactgcatacccagtatccagtgagttctcaggctgtctccagcttggatgtaagaagaggcctcctccgggcatctgtagtcccagctactcgggaggctgaggcaggagaatggcgtgaacctgggaggcggagcttgcagtgagctgagattgtgccactgcactccagcctgggggacagagcgagactctgtctcaaaaaaataaaaaaagaagaggcctcctcctgtgctgtgtgtgggcctacacaggtggctaggacaaccctgattggacctcaaagaagccaaaggatgccaatgtcctcccattagatcagggtggtcccgatgcctgggagtctgcccagccccttctatggggacctagtctgattcagcttctgtttcttccaagttctttctgatttgctgttggaaaatcagaaagtaattgattttctgatatctacctgtctggtctttttttttttttgttgagacaggttctcactctgtcacccaagctggagtacagtggtgtgaccatagctcattgcaacctcgacctccttggctcaagtgatcctcccttctcagcctcctgagtagctaggactacaggtgcatgccaccatgcctggctagtttttaaatttttttttttgcagagatgaagtctcactatgttatccaggttggtcttgaactcttggcctcagtgattctcctaccttgacctcccaaggtatgagggttacaggtgtgagccgcctcgccaaccctatctggctttttaaaagcagggaactctgttccctttgtgtttgtatccctggctgataataataatttgtcagtgtttagcctgtgtccatgcctggtaagtgttaagcactgtcaacactcttctgatacttaatccccataacagccctctgaggttgatacaattattacctccatctaatagaaggaaaaacttgagtcaaaagagattaaggaatttatcaatgccaatgttcaccttctagcaagagaccagtctgggtttgaattccactttgcctgataccaaatcccatgctcttagccctgcactgtgcctggcagtatctgttgcacgtgggagccctcagcacagtgttgggaatacagcatggatgcggccgttctccccatccaaagtcctctcagctttgggtgagggctgacctccgaggagtcacagctgccttcatccagaccctctggattaggccctgtgttgccaacatctgcctgaactacacttgtatctgctattcctgtttgacccagtacataagccctcctggtccccctggctcccatcccagaaaccagcttctgtagccagagaatgctcaccagccctccccgtggcttcttccctgctctctgccagcttttcttccacttttcagtttggttaagatctgaagtctcccatgatccactattaaggatgaatgattaggcttcaaattagaaggcacttaggaattaattgtctgaaagggctgacatttcactccagttgggaagtttttaatcaattcccagatcaatgcacagctctcctaattggaagaatctgacggaaatcagagggctactcagtttttataaagtatctataaaaatagataggttagggagctagtgttgaccaagtgacgtatgttggttgcgttaatacaagtattgtctgtacagtgagggaggtgattggctcttgatttggtgagtcccaggttacatggaggaaggtagacaatatttccctgggagagctgggaaggttaaaggatgctagagggaggataccatagccatggccctatagtgctatctctttgaactgaaaaaaactggaatcagtgccttacttgaaaagtgatagaggtgctgctcagcagccctgggcaaacttccagggtagcaaacccagttctgccagaagctctggccttcagtaatatcccagggagagaagcggtgaccctgtaaggctgaagagctaaggatgattatgccaatggaaatccctaaagagattttatgtttctcagctgcagtaccatgaggctcagcaagacgaggaaggggcttgttcaagacttgggcatccctcttgatacttattcattgaaggtcaaatgcaggttacatgtgactcaggtgcggttgccctgttaagccctttatgggaccaggtctctctaggcccaccagcggccatctctctacttttcacacagttgccccagggatgtttctgcaacttgcatctgatcacttttcttccctaccctcaatccctctgtggctcccaatcatctgtaagaactttgggatctcattcctgcagtatcttcagcttcttcatctatcagttccttccttccccatctcacataagttggtcgcatgctgacagttcctgaaaaagccagactatgccgcttctgtaggtcctggttcacatggttccttttctctgagtgcccctctgctcctgtctgtgcagtgaccacctactcagctttcacgaaccagtctgcacatgccaactccataaagcctttcctgcccctttcctgccccctttccctgtcctccccggagaaaggaaaggaccttgtgtgtgccccgtggagatgtctgacttgtaccccctagtgcactgatgtcccctttaggaccatgccacttagctctctatgacaagcatgctatgaaacactgcagcacagtgctcaaggtcaagggttccaaatcctagctctgacactccctgctgtgtggccttaacaatctacttaaccttctgagcctgttttctcctctgtaatatggaaaagataatagtacttcccttactgggttattgaaagaatcaaatgtgaaaattcaggcagtgttcagtcacactgcctggtctatggtgtatgctcagtaagcattagttattattgtttgtattcttgtcatcatcatcataactagcatcatcatttgttgagttgagatctggtctggcattgagtaggtgctatacacaaaagtataaaattaaggactgacatgcaaagtcctatctcaccaaaagggtgagaccattctttaaattcttatctgcaaattaatatttgttgagtgactaaatggaaaagtgtggataaaatgtgactctcagattggagtaaagttggagaataaacctgggtaaggagcaagtggaaggttgtccaatttctgtggatggggcccaagaagacactgccacatggtggtgggagggagtcagaggccctgaagccaggcaacgtacaggtcaagcaatgccagccccttgggctaagggaagcaattattggagagtcagaaatctgtactttgagaacctgcctttatgtggctggtgttttctgtagttatttcgtttgtgctccccctcagtcttaagcgtggcatgctgcttttagtgatttttttttttttttttggagggagagtttctttttgatgccagcccgtctcagctatactaaggagaaacagagaaagtgactgaactgaaatgtaaatggagggactgcagtctcatgatgacattatgggctttggagagagacctacccatgtttgatgtctgctggttctgtgacgtttttgtatctcagtttcctcatcagtaaaatggggataagaatagtatccactgcaaaatgttgccgggaagatggaatgcgattgtgcccacagggtgcttagcattatgcctggcacattgacagagaggacaaagacagaagttaaaggcattgggggtggtatagcatccataggtggaaggaaatgaaggggaagggggagtcaaagtctgagagtcccaaaaggcaagtgaactctggagcacctgaaaatctccttccagggtggaatgtgttcccctgggagggccctttgttatattcaaataaagaaggttattgtctgagggggacttgatcaccattttcaaatatttgataagaaagataagagggtatggtgtaggacagatgacctttaggtctcttccaagtctgagattctctgattcaagaatggggaagggcccaaaagtggttgtattattggttcaaagtagggctgactacacaggtcttgcagaaaaggaggcagcatggcagaagttataagtgagggcttgagggacagaactgggttcaattcctggttctgccacttattagctgtgtgacctgggaaaatcaactaacctctctgagtctcagttttctcatctggaagatgataatatttaccacagagggtttgtgatgatcaaatgatataatgcacggaaatcccttggctagtatgtagaacctagtagtgatagattcattgcatttaagaatgtctaatgttagtgaaataatttacctgcaataataatatgatacatcaaaacaacataataataacgcttaagattgttgttattgataaagtaacacacaattctctgtcacggttcagattaaacgtggagctgtgggatatggaagccctgcatgccccagcactcaggactgcccagtgctgggacagtgtccctagtcacatgttttgtaggccagtcagaagatcgtactccacccctacccccaacccttgaccatgagccccgagaacctggaagctgcttttcccagtaaactatggagtgtttggtgcactctttgatttttatttatttatttacttattggtagagatgggggtcttgccatgtcacccatgctgatcccaaactcctggcctcaagtcctcctgcctcaggctcccaaagtgcaaagattacagatgtgaaccagtgtacctggcctggtccaccctttgaaactccctctgcaccttttctgactcttcttgaccaagcttgtctctaaccttacaacaacaatgccagcaataataataacagctgctatttatgttgcatttactttctacttgtagatgacattgtgccaagagttctctgtaagtgctctaatttaatcttcaaatatagttggggttccaggaggtttgataacttgagcagaaagccctggattacagcctagttgaggaagaagacccagaagctctcttacttttgctccctgctggcttctcctgtgtgggttccagcacaaagcctcctcccctagaaacatcaggctgagtgaaggcaacatgattttgcctcagtgctgcctttcttctccaaggactggtgagggtcgggtctccagggagtcatctgagagagtgttaccctgattctcactggagtgcatcaacccaatgcccatgaagcccaggggcttgccacagcgctcctgacctgtgcgagggtccaaaaaggctcttgtgtgagccattccccacctgtggggtgcaacaaggaccaggacacctgcttctctgggcagccctgacatctggacacaatgcagagggcagatcacgagtggactctgggacatagaaaggtgagatagcaaggaaggaccggttagaaaataaacatcacagcattgacccaatcccagtccctgccacaagcttgggtgccccaaacttggccacagggagcctgtttctgctgggtcgaggggttgctggagttgacatgcccagggcctctcagttcatgtgctcaccccttgcatttcatgcagcctacgcctgccatgtctgccaattagcataaggcagtatgtccggcaaaaaacaggtgggtgtttccttctccctatgcacagggattgtgcccagagcacatacccatatctcattctctgtagcaacagccacacccatgccccaaccatttaatagcttctcagcctgtcctattctaaggcaggaaagggtcggtggcagttccagccttatcctcagggtctgacacaatcgggcttttacgaaaggcatgttttactgccacctgggtctagcctagtgaccctgagaccctgcctcttcatgactcctaagcccatcttctgtgcaaagccccagagctaggggcttccagaggcatttcctgccttattctttgtgccttaatctgtgtcccaggatcctgcccttgccctcaggttctctgggctcctactagtattccccaaacctggtgggtgctgctagaccacagcttgaactcccaaacacctgcaacaggcccccaagagttggacttcccattcacgtggattttagagctaagcctacttctggatttcccattgctgggccctatatgactgtcacactctctagttccctgaatatactgcccacattctgacagtgccatagggctgtcatctatgtctgggctccagatttcaggataattgcttctgtctgatagatcaacctccccccttcaggtctaactagtttctgatcccatcctctcctagcctgccctgtccagctgcagtgaacacagttgtttctggccctatcccaaggtttaccagacccttcacctaagttagtaacaataattactagcttgttcattcaaaaaagcattaactactttcctgccacatgctagcctatgaggcttgatactggatattcagagagagaaaaacttttttttctttttttttttttttttttgagacagagtctcactctgtcgcccaggctggagtgcagtagtgcgatcttggctcactgcaagctccgcctcccgggttcacgccattctcctgcctcagcctcctgagtagctgggactacaggcgcccaacaccacacccggctaattgttttctttctttctttctttctttcttttttttttttttttgtatttttagtagtgacggggtttcgccctattagccaggatggtctcaatctcctgacctcgtgatccacctgcctcagcctcctgaagtgctgggattacaggcgtgagccactgcgcccggacgagagaacttttatcatccctgtgcgattggagctttggtttcgtggaggagagagacagtcaataaactggcaaacaaagaaatagagaatatactttggcaaatagtgattatcttgggcagaggattatggggaatttcacacattccaagtcacacatttctgtaatattagaaattttacaagcatacactgagcagggaaagaagtaaatattataaacaaacaaaagaatatttgtcatccaagtctagggcttcatctccaactcactgtttctaaatcaaacgagtacatggtgaggccatttatggagatggagaagattataatgaaattaggttgaactagatacaattgctgtatttgtgggtcaataatgataataataacgtagctaagattcagtgagcacttgctacgtctcagatactatgctaattgctgtgaacatattgtttcatttaacactacagtcattattatcctcttttccagaaacagaagtttaggttaggcaaattactcgactattatctcacggctgtgaggcatagtagctgggactctaaccaggtcattgtactcttaggttggctggtctatttcccttagaactactacctgcattaggggacataagcacatcatagcaacaccagtgaaagcccaaagtgggagatagcatttaatcttctgctctgcaagtgaattgctggagaatgtatttttaaacccctatgggaatgctgagaatgcttaagaaagacagttaaataaacagagcgatgaggaggcaggtgaatttatttttagcgtctctctgtatagagaaggcaccagaggcagagaacaagaaattgccctgcatattaatggggaagctgagaactgacaacagaggaactggaagcttatgattctccagccctgccttcctggtaggtccccattggaacaaaacctcatcgccatgatctcttactgaaagagtcacataagggtatgctaaggcacacacaaggatgctcactgcaactgcaaaacttagaaaaccatagaaatgttcatcatcaaaggactagataaacagaatggagcccatgcatacaaagtaatagtatgcaaccatttcaatgacggatacaattttatattaattgacatggactgatgcccatgaaatgttgtttagagaagcaagcaagttgcagaacaatattgcattattttgtttttgtaaaaattaacaatgatgtgtatatgtgtgaatatatgtggatatgttatgtgcatatatacatattaatacagattcaaaatgctagtatatgcaaataaaacatacagggaaaggtgtcaaaatattaacgggtcatggtagagtttcatgttttaagttgtgcatttctgaatgttataatatttataaggatatcctgagtttgaccattaaaatacaacaagataatcttatatattcttgcttctcctgtcctaatcagcatgacgtgccttagggggaagaaggcagccttcagtccctctcattatcctaccatgtgtcaggacatctggcctcaaacctcattattgggccaccttgttgtcctgtagagagctaacaggacccgccctggctggtttgagagctagtattcaggtggaaagcttgggaagatgcctggccctccttttatcatctccatacggctgccctgatttctttctaagagtccatatttatggggcacatgtctctgggctgctttccgcagctgagaagatattaactgaaattttctcaatcattcactctactcctttctaggaagcaaatagttctgaaagtctttatctggatatgcatacacacacagcactcagacacacaccaatatgagctcagacacttgcatggcaacacaccaagtgacaaagacaacctacaactactcaaactccatgcttacaaagctgcagacacatggcagtaacacacaagcatatgcatgcacacacacccacacacacacacacaccacacacctgtacaattctctccagctttgaaagagaaaaaaggggaggtgtactctagaccctccagcaggctgaccaaagaaacttctgaacatgcaacacttctttctccccttcctccttcttctcctccccttgttcctcttccctctcttctttctcttccactattgtccctatgcaagatgatttttttctaagctcccttagaaaaaaagctaagatttttttctaagctcagaggctaaatgatgcagctagaagcagaatctggaccaccaattaaaaactgcctgaggtagcaaggagcaggtttttccttgattgtttctccctacctgcctgtactgctgcctctcccaaagcagcaagctggccactgaagtgcccttttccaaagagcagctcggctcctagatctgcatctccagctcctgctccgattcctctggttactctgggcacctccaagctccccaccctaccttatgtccacatacaaaggatgggtttggagagggaggaaagaggaactagaaaggagatttttagcatcagaaaggaactcatactaaatacatttttgttggggatgaatgggaagattttttctcacgtctttgttcccaagttttgatgaaaatttgtgctgtaagggatctttctgcttcccactccagtggctataaacagccacacatatacaccttaaaacatcatcttgaacacaataaatatacacaatgctatctgtcaatttaaaagaaagaaagcaaataaggaaggaaggaagggcaaaccacatccttgtcaacattgtaattacctgactacctgactggtacttcctgcctgctgcacaaatgaaactagttcactgagcccgtggtattacagtaaagaaagagtttaattgaaaggaggtcagccaggtggaagaattgtagttatcactcaaataagtctccccagaggctgagaggttagggtttttcaaggatagtttggcggatgaggggctagggaacgggtgctgctgattggctggagatgcaatcaaggggtatggaaaatggttcttgtgtacagagtctgcctctgggtgggggccacaggactggttgagttatgagtcaaaagtctagataggctcagtcagttgccagaattcaaaagtctgaaaaacatctcaaaagacaaatcttaggttcttataataatgatgttatctacaggagtaattggagaagttacaagtcttgtggcttccagaacagtctgtctatcatttaactatacctatatattagcagaattcaggttcccctcataatcctaacctgtggtgtttcattagttttacaagggtgatttagttttgggaagggctagtctcatccttgctttaaagttaaattataagttaaattcctcccgtgattagcctggcctctgcccaggaatgagcaaggacagttagcctgtgaggatagaagcaagatggagttagctatgctagatttatctcactgtcataatctttgctaaggcagtttcaacatcaccaagaatgctctgatcgatgagtgttgtctgccgaggatgtaacgcggagtagaaccacatatgcacaccatttgcatgaatgcatgcctgcctagtttgtacacacacacacacacacaaacatttatttgtcatttattgagagtattatatcttggatacaatgttgggacctaggacctgtgctccaggagtcattgttgaacagagagatgggtatagcagctcctgccagtgccccacctcaagaaggctgcttaatgagagctgctgtgactctgcctgagaatttttttttcctggcagcccaagcacattttatccctgaacagaataagccaaaactaccagaggattagtatccctgggctgccctcaaccaaggatggatggtgagttagtgggcacttcccggcttccttgtccatcagttgcaaaaccttcaaggcctatttcctggagttctctggcaggactgcaccccagttgtcctgggtggtcatgggccagataacacaccctttactgaatttttcccttttctgcctccgttccccaaagcaaagaatgaagagaggttgtcaccggtgtctaatgagtgatataaaggtgaagaggagataccatgggagctcaccatggggagacccaaccagccaagcagaccaaggccaaactggtgatgggcaggtgcagaatgccagacgtgaggcttttccaaggagtcaatctgcttaagagacacagaatgaagcaatgtgtgtggaagcacttggtaaactggctagctttgtagcatgtggaaaatcattattgagaaatgtgaccagacaaagagatttcatcccctctcctgggtctctgcaatcaggcagtttatcttcttagccacagcttccctttctgggcccttttccagaacactccatggtccatgtgaactttttactctttttcttcgttccaaatcttccctgagaaaagtctcttatgtttatcttacacccactgtggtgacttcagtcaaaggttcccactctggggtccctgggagcctgcttcttagtgaccatgaaattctcaaagaggaactgccccgaggagctgcctccttgggagtggggcaggagctgttaatcctgtgacacaggaagtacactgcacccatgtttcttcccaaagggggacccattttcagcccaaacactaatcaggaagtgactcttctcaccaaaaggggtggcataaaaatcttccctttgccccatactaagggtgggcagaaagctcaggttaagaaaaaaaaaaaaaaaaagcggaacaaagccctccattgtttaacaaatagagccagcggccagtattcggcagaacttattggagggaataaaagcctccaaaaaacatcaatggataatgattattcttaaagtgccctttgagcaattgcattaggagagatggaaaatagtctgtaaatagtaacaagggtcctgatacaaggaagtgactgtaacagggacaaggattaccagtgtatgaatattcctgaactccctcacccctgggcttctaagggaggaggatttctgatcgctgtgtcggatcctggcctctttcttgaggataattcgggtaggggatgcaatggagagaaggctaaggaggttggaggggtttttatctacataataaagatctaagaaagaggaaaggctgaagtgaggagacagggagaggcgggaaagagagagaggagagagaaaagctgccatgggggctgagggagttttgggggtgcaagatatctagaaagagagtatttagaagagcaacaagggatgaggggatttgaaagagattttctttgaattaagaatgcacacccacctttgcatttcgccaaaagacaagtcacgaatcgaaacatgtttaatcattgtttgcttgccagacttcatttctttgcaaaaaaaccacaaagcacctcctgatccacctggattagacagccaatctcacagagagagcacggactgtgaacggcatagggtacacacaaggacatacagagtccagaagaagaactcaaactaagttggcacagagactctctcagcagctgcacttttaagagttcttattcagttcttactgaagagaaactgcaagggcctcacaggccctgttgagtagcgttcagggtttacagtagaaatgcgtgtcaatgttagttatttaggaacctgcgtgtagttcccattctgcggtgtggagtcagtcattctcaacagatgctttagttatctctagagtccctcgtaggtattgctgaggctgagccctgctgcccctggctggcctgcgagagtcaggtttcatcggctgagagcaggaatccccataagcacctctcagagaatgtgggactcaggaggcatgtttcatgggggctggctacgcaagacacttgcacttgagtccctaccttggaaaaagaaaaactctgtccctagtaaaggaatggcagcaacatagaccctatgggagaaggggtcttctttaggccacggagtaacttgctgtgatgctgaagttaggcctggttagggctgggctgcctatttctgctacagagaaggatgaacctgcctctgttcctctctccatggagacatctgttcccttgggtggcttcctggatccttcatagaatctcctttcctctagccccatttttcagcccagcttatagacagttctattccttgcccagcacgtggctatagacagggctgagagaggaaagctgaagagattgaaaatgcaaacaaaacaaaacagaagaacccaccttcacttctttactgaacatccgcacacagcacacgctcagcatatactataagctctgttctccttctgcagacatgtacacacccctgagtaataatgctgtctgtgtgttctcatgcatggtggtgcccaaaaggccataggaatttgacagttgaggaaactgaatccagggaagctcaaggactcactcagagccacacagcacccagaacttgaaccaacattccagactccttgtccactgctcttcctgttcagatcatgtatggacacatgcagtggtgcagagtgtgcctcactttatcatcccagaagcccctctttttgcagctgaatggaatcactccaaaacataggaagaccgaggataccccttgaagataccaaaacctcacctccttctggttgcactatggagctggacagtgagggttctctgtggcaggacagtttaaagtcaggcagggatgccattagcaccaattgcgtggtctgtacaaaagggactggaaagaaatagaataagtctcagtgccttcatctgcataatgggcatattaacaggctctatcacccagggctgtggaaaggattaagtgagatataaaaagatcatacatttctttttcttaattttcctattttttatttttagtttttaggtatacatagtaagtgtatatatttatagggagaagatcatacatttcctaggacaggactaatacattcagctgtggctattatcagagagcaccaagaccttaggtagggcaaccagactggctatggggcttgacataagccaggcccatggcccataaactatttcaggtaggaagtaagcaatactataactcgcactctagggggagcaaaaggacaccccccccccccccacacacaatggttatggctgcacacctggtctcaatacagtgaaacttgggacttgctgccaagctccaccaggcaaggggcagaggacactgagtctccccagactgagtcaggagcagctcaggagctgacactggcctgagtttgcagcaaagggcccttgagtaccaggctaggcagctctggagaaggcggaagtggagaaagttccaaagtcaattccactctgacacactgtttgtgatgttccacagtcagcacaatgcctgccccttgtaagggttgcaaaaatacttgttgaatgaatgaatcaatcagtgatacagaccaaggtcaaatcagaaccccaaaccctaaagactttatactctcactgtccgtccatcaaccttctatcctgtcagaagtcaggatatcccttgcaagaccctttgctgtcctttcagttatcttttgaatagaggctctgagccttgcaagtattgcctgggaaatatcaactccctcaattaattatatggtgctatctgaccaggaccttattttggtataatgtgaacctgagacaggagcacctcctagttgcatctttgaaatgccaagcaccttcattcatgcttagccctggattgtggggagacctgcaaaccttgtcagagcatggcttcccaagggccaggtcacagggcactttgcagccagaactcagccagtactgcctgtggctaagcacactaatttgttgaccagggtgggtgcccttggcagctccaaccaccacgtagatactccagtaagtttttctacttcaaagaatggaggttttcaaactctgttggccatgacccacagtaggaaatacatattgcagtgacccagcgcatttatgcatacgatgtattttatcattctcacatgctcatttccccccccccacatttgaacatctctgaaatttggatatgttttacaaattatgacatcttgccattaattggcagcatttttttctttctgggtgatacataaaattttgcatcttccaataaatgatgactgtgattcagtgaaatatggcatatgtgtaacttaaaaatactttttataaaaactatctttgctgcatggtgctctatgacattttctatgtgttattttacttcttctcctttcaatgctgttcactgctacccatttagtcaacttgcaccaccctttagagggtcttcaattgttattttcaacatatagtcacaggaacagaggatggtgttagtgaactctgtgactaaagagttttccataaatgggtggacctgagatttacaagcattaagttattgggccaggaggtggaatagatcatgattaggagagtcgaaaagaaagatgacaaatcactttaagtcagacaaacctctttctatactagctcccttacttactaatcatataactgtggatacatttataaaaattattagtgtcttagttttctcacctgtaaaacactgaacagagctcctgtcattcagagctgttgtcaacaagagagttagagtgtaaagcattgacttggggcctgcatgtagtaggcactcaataaatggtggcaatcatggcattggtgataatgacgctcagtaattagtaggtgttattattaaaagttgcaaaaacggctagtacccaacatgactttagctggtataaagatcttataattatttttaaagtcgcaaactattgtattcatttgattgtatagtttcttgccatcacaacaaacactcctattcatgtctaattcaatacttggtgagtccaagaaagcatttgggtccctactgatgggagcaccatggccaagtcaccctcttggtcaggttctcttgcttctcgttgtgtgtcttatctcactgtaggctttcaaactatgggctcgggcaagcctttccagtgatcacattaatcttatattttatgtgttaacgtgtgcctccaataacttgctttccttgctcaccatggtgatgcgtttttcctgctttgtgtcctccctcattgattatgatgggctgttgactatttgaacctggtacttctacttgatcagctctacacagtttcactccttttcaatttcagtttctcttttatcagtgttctctgtcaatccttataggcctagatgttcattgtggtttcatcatctatttgatctctcctgtgatgtttcattagcatttcttcaatagtttctcaggggtatttgccatgattcagccattgtacacttcttaaaactttcaagcctttgaataactgaaggaatgtctcacagaaacataacctttcttgattacatgaattaaccctcaaaaatgcatccgattatcagaaataccttaatgcattgtattgggttcaaaatggataaggtatgtttagtattacgtgatgaataaattctaagcttaatttaaaaaatgttaagtaaatgtctagagatgcatacaattctaataaatagatattttctacctgtctcctgtcattgtcaacatttgtaaactaacaggcatggttttcttgtgaataccagatatttgtgtgttcattggcttgattgaatatgtgaaacattcctagacttctttagctcagtatgtaggaaggtagatgggtagataagaaaggaggaagaacagtaggaagataaatatgtcggttgatagataggtaataaggataattgccatcattattattttgcttggtttttcatgattagccacgtgaaacattattatagtttattgcgcgtgttcctggtctcttagtttgcaaagagcattcacctcatgatctcctaactactcagtaatagagacaaagtaaatattcccatttgacagaggaggacatagaagtccagagaggtgagctccatgagcaaaacgttagatgcagtaatgtaatgccgtaaataaatggcaaatctggagatgaatccctgggctcctaattcagtgctccttctacaatactaggtaggcagagatgacaagaaaaaatgttggaagtagcaatgggtactcctttccccattccttctgtgaagggctttggtttcatttaaaaagtagaacactctaaaaaacttggctcaagactttttggctctcataaagcaacattaaaacaaaatggccccaggtcataaagattgcattgtactgagaaatgacctcgcacagtggtcaacctcagtcccagacaagcttgcaaagcagaaaatcttattttccacttttcctgaccagcttttctggagccctgagctctctttcttatgaatggggacactgagctaagaactgagatttcctgatgcctagataggatctttactccttacccatatttttgacacctggtatctgacctttgcaggccaaagggccagtttctgttgagttctgataaagtcagtccacaagtgctatttgctggtcatctcatctgtgactatcttctgctgggcattggttccaccttattctaatctctgattgtcaaaatacaactcagtccttgcagggatagtggaaatgccaatgaattgggcaattttatagtgtgtctagtacatgccataacttcttaacatgtaattttaattctcacaacaaacttatgaggttgttgctatcattccactttatagacaggaagatggaggcttaaaaaggctaagcaaactcatcagtggtgaacagctggtgcacagtagagctgggatccaaatgcacaactgcctgatctcaaagcactaatttttacactctgtcattagcacctgaatacttttgttttcaaatccccagctcaccgggggtttggaccccaaattttaaagaaacactgtcacccaactcaattcttctgaccatgaacaaacatcccaagcagtatgagaaattttagcagccatggtgcagagctctctgaagcctgatatagattaggaacagaaagaagattagatgtgtgtatattatggattgtgggcataagacttggataaggaaaagattgcattgtactgagaaataaccttatttgagggaaggaagagatgttccactgattggccagatcccaagatgctagcatgggagtgaaggtgggcttggaaggggaaaagaaggaatccacagccctctttctgccctgggtggtataagaaagttgaaggaattaggggaagacgagtgtgctcttggggatcacatcccttggagggagaagagagacttagagacagtgagtccccttctacttctgtattttgtatagaacagacacttctacaccttagtttctttgaattccaggtattggaaacagaaataacaaaaacatgtacattttactacttcagttctactgaaaatcagattccttgacaagctgggatggggctgtcggtgagggatcatccctgtaatatcaacttctgggtgcagagtagctacagagggatgcaaggggcaaaaagagtctaggtgttcttgtaattatcaaccaatagtggaaatggcagagtgacagagtaaagtagggaggaaggggagaagtggccagcaggcacagtgctgggggagctgacagtgaatggcgcagggggcagagctgggggagagcggtggaggagtctgagaaggctccttgtgaacatattttgagctttggaagatgaggtaggtgggacgcacaggaaggagagggacagctttcccaccagggaaccttgtttggagaagttactgaagttgatgcccacagccctgtactgttgtttggccagagtggaggactgtcttgaatggtgtatgaaaatgaggtgaaagatgccatggaaagcacctgcctggggtggctacaacatcttgctgcctctgtttatcaatctgtcaaattggagaaataatccgttttatagaaatgtcaggaggattaaaagtggtagcgtatgtcaaggatccagcccactccttggcataaaatagatgccctgtgaactgtcacttcttactcattagaaagggaagatgatgggtccttggggcctctttcatatacatttaaatggttgttgaaagggatcctggagcccctcttggatacaatagaatgcctccattgcaccacaccccaagacgcaggagagaactctgctgggcacactgtagggcaccagcttgtcttcttcctgctgtagcttgcagtagggaggtctgggacctgataatgaggggcagaccagcagggctgagaccccaggttacccactctgatggcctctgccctgctgcttgtgtgtgttcacccatgagtgtgtgtgcctgtgcacatgtgtatatctgtgctcatgtgtataaatgtgtatccttctcagtaactctaaagcctagagaatgacagacagaggatgggcaaaatgaaagccaaagataattgtcattgatctatctacttaatggcctgaaaatgcccaattagagcagggtgcatggctggctgctgagccagagggctgagggaattctctgggctactgctcatagtgcactgcttttattgaggtgccctgtggatagccaaggctttcttactcctgcctccctgggagaagggtcctggattccagacaccagggaggtatgacatgccacccccatacctgtcaccagtaatctaatagtggcttcctggcttcatctctgggcttggcatgtgaggacggtccccatcatgaatcacaagatgtatttcttaactgtcttcctttcctttttgcctctgaactgtgagctgaagatgaggtgaatgtagtattatcaagatgaacagagtccagtggagcctggggagggaggctccatctggtggcagccacatgtaattctgagggaccacacttaagaactaaatgcactgtggcttgcttcccagctctggaaggtgtgggatgttaggcagctcacttggtctctctgagcagaggcagcaagcattacgatgatatctaacaatttctggtcctttccagtgcactgtcctggctagagccactaacaccccctgcctgggttattaaaagatgagcacttcgcatgttgttcactgcagtatccccactgccttaaacaatgactgctatataggaaggacttagtaacaatatattgaataaataagtagaagacaagatgactgcctggggcctcaaatctgcaaacgccttatgtgggcaaggatctttctaagacagggtcatctagaaaccacagtgaacaccttctacatgcgcagcctgcattgtgaaactctagggtctctatttgtgtcaaatacaatgggggctgtgcctctgaggttgcaatgtgggggactagccagacctaagaagaatgaagaactctcagtctttgcacttgagcttattgttgattcatccacataactgtggtctataaaactattcaactcacatgtacaattttaggaaaagtcatgtttgaatgattttcatctttagaaactataaaactgtattgttaaaaaatattctgagaacccatttatgatgttaaaacttcagaaaaatagaaatagaggggctgttcttaacttgatagagtgcatctccaaaatacttgtagctaaaatactcgatgctgaaagaccgaataccttccccctaagatgtggaagtaaagatatccactctcaccactcattcaacatcgttctgtaagttctagccagtgcaacaaggccagaaaagaaaataaaaggcatacatgtcagaaaggaagaaattaaactaaccctatttgaaattacgtgattgtctacatataaagtaccaaagaatccacaacaaaaccgtctacaactaataagtgaattcggcaaggttgcaagacaagatcaatatacaaaaatcaactgtatttctatatactaacaataaacacatgggcattgaaatgcagaataaaatatttacaattgctcaaaaaataaaataattacaatctaaatatgtacaggactgacttgtatgttcaaaactacacatgctgatgagagaaatcaaagatctgaaaaatggagagacataccatgttcacggattgaaaaactcgacatatcaactcttcccaaattgacatacaggtttaatgcaatttctatgaaaatcctagtatttttttaggaatagataagattattctaatatgtgtatgaaaaggcaaagtaactagagttgctgaaattattttgaaaaagaggatcaagtggtagcaatcagtcttctgaatttcaggacattacacagctacattaatcaaaactgtgcagtattggtggaggaatagacacacatattaaagaaacagaacaaagaaccaagaaattgacccacacaaatatgtccaacagatttttgacagaattgcagaagcaattcagtaaaggaaggtaaattttgaacaaatgatgctggagcaagtggatatccataggccaaaagatgaacctcaacctaagccttactttaactattaactcaaagtggatcagagacttttgtataaatggtaaaactatgaaacgtagaaaaaatatagataaattatttcagacttgacactgaaagtgtggtccgtaaagaaaaaattgataaattgaatttcatcaaaattaaaaacttttgctatttgaaagactctcttaagagggtaaaaagacaaggtacaaaatgagaggaaatactttcaaattacatattggacaaagtattagtatttggaatatataaagaactctcaaaactccatagtgaaaaacaatataattagaaaatgaacaaaagttataaagagacatttcactgaagagaatatacagatggcaaataagcacatgaaaaatgctcgacatcattagctattaggaaaatgcaaattaaaaccacaatgagtgatcactatccctctatcagaatgaataaaataaaaaagagtgagaactccaaatgctgacgaggatgggagaaactggatcactcagacattactggcgagcatgtaaaatgacacagctaccctggaaagttgcaatttcttaaaaaactaaacacacgactaccatatgacccagcaattgcacctctgggcatttatcccagagaaatgaagacttatgttcacacaaaaatcagtatgcaaatgttgatagcagctttattcgtaatagcgaaaacctgaaacaactcagatgtcctagaatggatggttaaacaaattgtggtatctccatattataaaatacttcctggcaataagaaagaacaaactattgatgtacaaacaacctggatgaattgcctgagatttatgctgagtggaaaaaaaaagaaacagtctcaaaaggttacatgctgtatgattccattcatataacattcttgaaatgatagttacaaaaaagcagaacagattagtggctcccaagagtttagcagggactgaggagtggaaggaaaggggctgtggctataaaagggtaacatgaaggatccttgtggtgatagaggtattctaccttttgactgtgtcaatgccaatgtccaggatgtgatattgtactatagttttgcaagatgttaccattagggtgaactaggtaaaaggcatacaggatctctctgcattatctcttattatttcttatagctgcatgtaaatctaaaagtattttaagatagaaagtttaattttaaaattaaagaagaacaaaaactacacatgtgacaaaattttgtagaaacacacacacacacacacacgagtgcctgctaaaccggtgagatctgagtaaagtctataatctagctaattgtattggtctggttaagtgtattgtgccactgtcgatttcctggttttgatcatttgttatgttatgaaaagtgttgagagaagctgggtgagtgataagtacgtagaacttttcgtattaattctgcaacgtcttgtgagtctataattatttcaaaataaaaaaagtctttaaaaagaaccgagaacaaaaaagaaaccatttattatggagccaaatgtaaaattccaacactgacagttctgttagaactgtcgccactcgtctggatgtgcattcgcaagctgccctgcgagtgctgtcaattgcaaattcagtcaattaggactcagcatcaggcagctggaatgacacttcctctagtgaagcctcagagagcttacttatgccactcatttcagatggagagcaagggtttgaatttgccccctctagagcccatgctcgcacttctgcaccgtatggcaaggttgagtcaggcagagcttgtcctcaagaagcccgcagtctgctgtggagagaggtgggcagtaaaacacatgctccagctgtagccatgtccctgtctggaccagttaactcaattcagtttcaacttgcagacagctccttcaagccaatcagacatcagagaaataaaaaggatgtgacaaaagagagtgaggtggagaacacagtctccctctcctggacaaactgctctgggaaagtttgcacttggaggtagatggggatgaagccaacacatcatcccgctgtggtgtggcaggaatcccagaaaggagtgtgtgcatgtgcatgcgtgtgtgtgtgagtgctgctgtaacagaagggcctcatctgtctgcccatctgtgaaatggggaggctgccaaaattcctcttcccttgggttctaacagactcccagcaagaatggaaaataagatattggggctgatatttaggtccttggacaataggatcaggacctagggatgtgaagagcaacagaggctgctctcagcctttctgtaagtgccccaggtgggcaggagactaatccaaaacaggagagacaggaggtctaattgctttttgctggactctgcctggagactctgattgaataggcctaggacactggaatgtcctcagacccatctcaagctcttgtgcaagaggcattaatagtagccaacatgcattgagtagcagttatgtgccaggtatgtttttaagcactttatatacatgatcttattcaatcctcgcaataactctgtgggcaggttccagtattacctctgatttatagttgaggaagttgaggtgcagactgtccaattttcctgcataaagtcacacgttagtggcagagctgagattgtaatttccagctccagaactcatgcttttaatcacaactgtagaatccctccttctgctatttgctttcctgctgggctagcctgagaaagccggggccagtcacccctcaactccgttgctgatccaagttgcaatacagatgggaggagaccgttcttcctgtctcagggaagctgccgccttggcagtgagaggaatgcagcatttatgcagtttgcatgtgtgcctctgtttcacaaattctccagtgcacaccaacagcactgccagtgactgatgaagaaatatggtttagaccaccagaaacctaaaggaccaaattccaggggatgagaaacacacttggcctggtaaagctgaaaggcataggggttggtatcaagagatttggaatccaattccaattctgccatttcctggcaaatgatcttggcatgcttttactctctttatgccttagctacatgttctaaaaaagataataatatatttgaccctcaagggtgttataaagataaagtgctggactacaaaaggctttacacgctaagctttattcgaatggctggaaccattgtcgtgatttccagggtaaaggaaactggagatccagatagcggagaagagcttgctggccttcttccctgttctctattggcaaaggggctgcctttagatttctgctctgacaccacgtaatcagtgaggcctccctaactatggcatttacaatagcatcatcccaccctggcacctctcctatctcctttctgtccttcagtatttatcatcatttgaccacactgttttttggggatgattacataaaacaatgtataacacatctaaaaattttaggagctcagcacatattatttactggggtagagggaactctttctccatgcaatttaaaaatgctcaactggtgtagtctcctggaatgagtattttgccctcagcctcacagaacagaagctaggtcaattacaccttcttgtctgcctggctccaggccagtcaatgatctcccatctcaggcatttggtattgttcttttgttagtttctaaagttccagtttcccagaagcttaaggaagcaatggattgctttggccaccttcctggtcttttaattaggaagtatttgcttcatttcagaacttgtgatatagaagaagaaacatggaatctggaaccccccagagctgagatcaggacttagttctaccacttatgatctgtaaatattgttattattacttaaaaatgtgataactaagggatatatatttcctgatatatgcaggcattgtacaggacaatctgtgtacataatctcatttgttcctttaaacaacccagaaaggcaaacattatattctttttgcagatgaggagactgaagtttagaaagtgaaaaagttggagctgatctcaggtccatcaaaatccatggatgcagttctttctactatatttaacatactcagtgaacctcatttttctcatctacaaaatggatctatcaatatttgtctcatagaggtactgtaatgataaagtaaggtgctgtctggctagaacaaggtacttagtaggagctggagctgtgcagaatctctcttccttcccccaatccctgaaggaaagtgagcatatcaaaagagctcactagagcttttagttgagagcacagaggtcaagaggagaccaataatttgcagaagcagaagtgaagatcaacatttttcctctttaacagaaactctgagcagctgtttctcccctaagcacatctgaactggataaggattgaccaggaggcctttgtagctctgtgcttggcttcttggctctgagccttaatcaataacctactcctgatctgtaagacataaaatctcaaggagtgacacactttccttcttcaaaatagttcttggaattcccatggtctagcaatgtgatgtcagatgatgagataggcctgggaggcaaaggcaacattatttatagacaccattgtgtataacatctttgtatctcttagagtcttgaagccaatgtgcttggcacaattagctggctttgatttgggacccagagctctcagactaaaactactcccaagtttactagaaataagtccacactaaatgaagtacaattcagaagaagtagggaatgtggtaaaacaggccactaagaagctctacaggatgctaagccagccatagaatgagtttttcttggtcaaaaagaagatggcttggctggcaccatggctcatgcctataaatcctggcactttggaaggctgaggtgggaggttcgcttgagaccaggagtttgagatcagcctgggcaacagaatgagacccatctctataacaaataaaacaacaaaaaaagaagacctcctaagtcttgaaaaagcagtcttggacagtgtcttgactggctcttctctcaatcccccactagatccaccacaccccatacactgggacaagtggtagcccttttagaatagttttctggctccttactgattccaccttcatcacagtgttgtcaaagaaccagacagacctggtgcctcgggaaagcccttctgctctacagacctcaattaagcctacctgtaaaactggaataatttcgttgccttggagattactgtgagagttaggtctctaaagcacctggcacaatgccttgcacatggtcattgcttcctgtttctcctccagttttccccaccagtttctcaattcctaatgccagaaatcccagaagtctgtctgggctattgctctgattcagattcatccaccttcctagatgttgaagaatggtctgcccactgcattccttctagctgccattgcaattaatctgtgccaatttcctacccacccctgctccaaacactgacactgcaatctctgatttgctcttgggcttcacagtcttgcttgtctatcttgggctaacaactccatctgaacattcttgaattgcttgactgttccaggaggccctgtcccttaattaccctgtctaatccatcctgttcagatctgagtttgactctgcaaggctgcacctctattttgggaatgattactgctatgatggttgattctatttttctatttttcatgtccaataaatagagtaatgatgaaccatgatgcaataaattgaatattgagtgttctttctattcagtccccatgtagaaaaaaatcttaatgagttctctatatctatcatgaagagagagaagttttcttccttttaagcttctcaagttgggttggagatttaactcagtgatctcattcctgtttcagaagtgttaacacttctgagttttggggggatagtattattatatatgttttctcttgtttgcttttagaggcagcatggcatagtggaagtagaaagggcccttaggatatctgtaacatttaccccagaagagccagtcatgagagtcttccctagaaactaaacctgagagggaaggagaaagaagaaaaaaggctttatgctcagagaagctcataatcatattatgggattatagcaaaaaaacaaacaaaccagaaatgacttaaatcttcaacaataagataaaggttaagtaaagaacatataatctccaaaaagagagagagagaggaaggagggagagagaaagagaatcagattgacaccagactttttataaatgacatgaagaccatgttaatggaaataaggtaataggctcaattcttacattaaagcatcagcttcttggcttgcttgtatctctaagtatgtccttgtcccccaacattgcaaatggcctaagaccaacacgttcctatttctggaacagaactcaaagcatgtctgccagggtccccctcagcaagtctgaagtatgcccactgcacttagtgggtatctccaaacctgcctgaaaacctctgctctgaggctttccatatgctgctctctccatcaggaatatgctctctattccttcttcaagtctcattttagaggtcttttcctccaggaaggcctcctggaacctccaagcctgtgtcttgtgttccccctctgtgttttcataacaccccatgttcccctatggtgggtctttatcccctcctgagttataatcatctgtttacttacttgtttctctaacaagcttattttccatggggccaaaaccctagacaaattctcttttcaataaccccgagtgttgctgaaatcaaaaggctatgaagaagcagaagtcttgtgaaggtgttgttgggaaagagaattgttcagatatgggtaagccactgaaaagtgtcttgatggttcatctgaacatgggctgagaacctgaagcagatacagaaagcaagatgaccatgctggaacaatgaggacagggaggatgggcagagtggctagggagaaggaggtcttggatgaacatctgagatagaaaatgcccctctggcggctcatgtgtgctctcctgatcacatgctctgacatggcaggccccagcccattctccttacgaacgacacttgctgggaatccctactgggcacacacaacccagtctacaagatagagtggtccaaaccccccatcctgggctgtggtgcttggaagatgcaacacaccgactggctacgctgcagttactgcatctttctggctggctggcaagcaaacttcccactgcctttctccccaggcctgaccccattatgacaatggagccattgttctgaacaggggccatgaggcagctgggactggccgaccctatgctggctcctcacatctcagaagtcaagccctcagacagatcaaggaaagtgataaaattcagtgggaagcaggacagagtattgggggtcctgagccagcttcttcctctcagttctgtatcgtgatgggaatgaataatcaccccaattacagagcaacctgaaggagacaaaatcacttaactaaatgaggtgcttggggaatggaaggtgggagcagtctgcaacgattttggcagaaacttctgggccagctcccccgaaagcttatatgaaaacaagcaatatgattatcagagctccaagtcagctgcctcagacacctttggcagtttctaaaaaaaaaaaaaaaaaaaaaagtctgctgcataattgtcatctccaggatgtttagaaaagggaacactggattaaacttagttggaatccaacagcgatctaataaaggcatgatcagaatatagggaggtgtgctcaagttaattagagcctgggggaagtgtgggcttggctgtcttcttccaacaactcctcagggatataattagctcctactacttgggacacatgccctctgcctactacaataagccagtccagagaagcaaaccatgacaaagactttgggctgaaggcttgcctagccctcacctgaggcctcacctgagcctgctattccatctcatacatgctgctcagagcctgggcttccatctgggctcagtccaatttgctactccttagaagtggcctgagcccagagcacagtgaaaagcaagacaagacaactaaatctgatactaaaccagagagggacagaggcccctgcactcatcagaaggccggatgatcttgagtgagccaggaagcgaagcataggaatccaaattccttttggccaatggggaaagtttgtgcagtcctccttcaggaggtgttagtgtgtggtttaaaaaaagcctttcagacattgattctgtccattttctgttactgcacctaaggcagcagtttgctctggaatgggagagcaggcatgtgtcttggtctcttggggctcctcatactgggtagtttgtaaacaacagaaatttagtgctcacagttctacaggctggaaagtccaagaccagggcactggcagattctgtgtctggtgagggcctgttgctcgtagatggtgacttcttgttgtgtctgcacacggtggaaggggcaaaagggctccctcaagtgcctttataagtgcatgcatcccattcacctcccaatcctctcctaaaggccccaccttggctggagctgcggctcacacctgtaatcccagtgctttgggaggctgaggtggacggatcttttgaggccagtagtttgagaccagcctggccaacacagtgaaaacccacctctaccaaaaatatatttttttaaaattagccagccatggtagttggcacctgtaatcctagctactcgggaggctgaggcaagagaattgcttgaacctgggaggcggaggttgcagtgagctgagatcgcgccactgcactccaacctgggcaacagagtgagactcttgtctcaaaaataaaaataaaataattttttaaaaaagccctacctcttaatcccatcacaatagggaatagatttcaacgtgaatttcggaggaacgcacacactcagaccacagcagcacgcagggcggagggtcctagtgtggacaccaggaagactgtggctggccactcagccggggaatattcctgtcttgtctctcacctctgcagttccttgaagcatatcattacattacggttgctttgcctgactcgagatcctcaaacccaacccctccactccagttccttcttagtacagtcctgagccacttaacaatgacaggtatatgttctgagaaatctgtcattaggcgactttatcattgtgcagacatcagagagtgtgcttacaaagcctccgtggtacagccgaccacacgcccaggctatgtgggagaacctattgctcctaggccacaaacctgtacattatgcgactgtcctcaatactgtaggcaattgtaacacaatggtaagggtttgtgtatctgaacaaagaaaagatacagtaaagatatagcataaatgattaaaaatgatacacctggcggggcgcggtggctcacgcctgtaatcccagctctttgggaggccgaggcaggcagatcactaggtcaagagatggagaccatcctggccaacatggtgaaaccccatctctactaaaaaaatacaaaaaattagccgggcgaggtggcaggcgcctgtagtcccagctactggggaggctgaggcaggagaatggcgtgaacccaggaggcgaagcttgcagtgagccgagatcgcgccactgcactccagcctgggtgacagagcgagactctgtctcaaataaataaataaataaataaataaataaataaataaataaataaaataaaaataaaaataaatagctgggcgtgttggcgcacgcctatagtcccagctactcaggaggctgaggcaggaggattgcttgaacccgggaggaggaggttgcagtgatccaagatcgtgccactgcactccagcctggcgacagagtgagactctgtcgcaaaaaacaaaacgaaacaaaaatgatacacccctatagggcacttagcatgattggatctcgcaggactagaagctgctctggttgagtcagtgagtgagtgatgagtgaatgtgaaggcctaggacattcctgtacactcttgtagactctataaacactgtccacttatgctacatcaaatttacaaaaaactatttttctttcttcaacaataaattaaccttagcttattgtaatgttttggctttctaaactttttaattaaaaaaaaatgactcttgtagtagcacttagcttaaaacacaaacacattgtacagctgtaggaaaatattttctttatattcttattctataagcttttttctgtttttaaaattatttattatttttactttttaaggatttttgttaaaaatggtgtacaattaactttcttttttaataagtaggagtacactctaaaataatgatgaaaagcatagtataataaatacataaaccagtagcacagtcatttattaaatattatttactgtacataattgtatgtgctgtgcttttacctgactggcagcatggtaggtttgtttacaccagcatcgtcacaaacatgtgtgtcccgtgctgcgctatgataccacatcagtaggtgacaaggatttttcacctctgttagactcttacggaaccactgtcgttaatgcggtccatcatggactgaaacgtcgttatgcggcccatgactgtattcctgaactttgccctcccactgcacccacacgttgagagctgcacggcacttctcagcccacaagcccactttccatgcaccaagcccaccccaccttacacttggcccctggctccttaaccttgagctcagcctccatcttaaggtttcaccaagctgcccttcactatccggtctgttggagattttccagctagactctgctagccacgctctgactctgtttgacccagctcccggggagaagccaagccgactcccttccactccctctgcccccgctgctgtcttacacagccgtaccttcctttcctttgccccctctcttggctggtgctgagccacatttagcaccagcctccaagagcaagcaccctgtgctaacttgggctcgtgtctcgcaagctaccaccctgatcttagaaacccgaagctcagaaaatagttcctatcttatgtgcgttatactcttcaagaaggtagttcgttttgcatcgtggaaggagcactaaactaggagtttaaagacttggatccacccttgattgcctcgcttggggctgccccattgcacaataacgagggccatcatctttgtagaataaatagaaacagagcaccctgaagttgtgtaaccaactgggttcccctggccaagtctagtggcatggccttgggcaagacattgaatgattctggacctcggtttccctatcttattcctagccaagtgtccttccttcagaacctcaagtttaggcaggggagagtagttgggaaatgatacctgagctttgccttatgctctgctagcatggagaagtggaaactgatttggagaaatagtttgaaggctgggaatgaaaacttgtttgcaacctagtcatgctgtttgattgattttccatgtggcataaagtcctggagatattctgaatgaaagtcaggcctttcttgactgtcccagtacacttgtgggaactgaggagagggctctggcagaaaactgactggcggcagaaataaaaccaccatagaacttaccttggtatctattcatccgctgtaacccacaggtccctgcctggttagactttacttcgctctgtccccctctactcatccctactttccttctcccagcaacacccttgggagggaagaatgagaccattcttgctcacttcttccttaagaaataatacttcctactatgcattatgtcagagcaaggatcttctatgtatatcgtttaatcctcaccagaaaatttggcaaggtgaaaatcattattactctcatcttaaaagtgagaaaattgaggctcagagaagctaagccacttgcctcaagccacacagcagttaggtagccgaagctcagttttcttatctgtaaagtagagatgaagtgcttcctacctcataggattgttgtgataattaaatgaagggtgtgttatgaatttagagcagggtctgataaaagtaacctctactcaagccaggcatggtggctcacgcttgtaatttcagcactttgggagaccgaggtggacagatcacttgaggtcaggagtttgagaccagcctggccaacaaagtgaaaccccatctccactaaaaatacaaaaattagccaggtgtggtggggggggcacctgtaatcccagctactcaggagactgaggcaggagaattgcttgaacctgggaggcggaggttgcagtgagccgagatcatgccactgtactccagcctgggtgacaaagcaagactctgtctcaaaaataaataaataaataaataaataaataaataaataaataaataagtaaaataaaaaatgaagtaagttctactcacttttagtactgtttcctccctccctccctccctccttccctcccttccttccttccttctttcttcctacttgtctttttcttttcttcccagaatttaagggtaattacaagaatatgtaagataaaatgagaaacatttaagtaactttcttaaggtcacgtaccagcaagcaggtcacaaatataagagttataaagttaaagaaatccaatatttttcaaaagggttcgtattcaacccgggtagtagtgaaatgtaaaggggaagacctgccaattgtggcctttttgctgactcttgttaggtgacaccaggcaacaggtctccacacgcactcgcatgcgcctgcacgcacacacactgacggagaactcaatgcacgagagacatcagtcactcaggttcacgatctcatttcatcttcaaaataactcagcaaggtaagtatatttcccccatttggcaaatgagaaaattgaggctttgtgagcttacccaagctttccaggttcacgcagcaggtaatgggggaatgtgagtcaaatccgggtttgtctgattccaaaatccttgcccttttgcctacacaatgttgcctccctctaagatcataaatatttctcagtgtaaatagtagtttctcagtatgagctttgtaaatggctctcagtggatcctaaaatgtttacctagagtgaagaagtgtgttttgctcattgaatgtaactgaggctaatgccgtcgttttttttttttcttcttctccaatcttcacagaagtatatgcgtgctaaagtgtgcttatagagtcttccttttagaccttacgtgtaaggtggcagtaattaaatgcaggttaaaagacaatttgtatttcattttgaaagtcttccctgtgcctcgaggttcgtggcagggctgagttgaactgtatgtaagtaccatgtggtaggggaactaatttataatttaatgcagcagtgggggtatggggacacagactgtaattttaaaacaagggaaagacttgccaacggatagcaggtttgagtttttatcagcaactgtgattgctgtcaatggatctgtgcccttccctgcacactccactgcctgctctcattattaatctctcatgtcttccaaatgttctcagctgaatcccagtgtgctcagggcagccctcctcagagtccctcaggccctacctaccgccagctgccccaaacctgtcctcacccagggctgtgtgaattctttgcttttactgttgcttttccctgacctttcagcctgtcttcatcctggggtattttccaagcacctcctttgaaatgcgtcctataaaattctccatgtctaagaggggtcaaggtttatctgatgctatcatctacctcactttctgcacacttacgacgtcagccttggtgcagttgccctgatagactccgcctcctctgaccttagggcccttacacatgttgcttgcttcctgtatctagacatctcttccctgacttttcacctgggaaagtatgttttgtctttggatctcagctcaattggccttctcaaggaagtggtctctggccagccagtcaaagtgaaagccttctagtctgtgctttcctctcagcagcctgggtttttcttcattgcatgcctcacaactgatactgaaacattcattcgtgtgattccttggcttatatcaatatgccccactctgcagtttggtagtttccaaagtggagtatacaagatgatccaatgagagctgagaagataaaatgagaattcccattgacattactctgatctaaaaatgtaaaattaagcctcacatatttcatatacacattgacactagtgcctccacttggcccactgtcaggcagccaagtgtcacatatggtccccgagcatccagagaagagtgggaaaaagtccaagaaatggacagttgatagagcagagctcccccctcttctttaacttgcagatacattgtgatggactcagttcacgtgttcccagcaaagaggatttttacaatatattgttgagttttagttaaatcaacccttacaaaatagacaagtggcttcaaaagattcccgcaagaaaccgtgagctgaaaatgatgtgagcaatgcaagcacaacagtcttcctggtgctatctcaccatcagccagatttctaggctaaaaaccaccctcatctaatcaggtccaaaaagaaaaagcccaaaaagctgcaattgttaaagtgactctttgaaatatccaagcatataatatcattcatgatgttttgtcaataaaaattttatttttttttttaagacaaagaaacaagaggctcagaaaggtgaaatgagttacccaaggtcacacgattcctcaatttctgggctcagaccgtgaaggcagggcttaagcattttaaggagatactgtttatttcctctcttcctcattgtttgaaagtttccattttgtgcattttttattattctcacaaactattggaaatgtggtccatatatacaatttatgcataaatgcatatacatatttcgaggtgtactcaaaagtatgtactgatgggggtgtcgaattccaattctgtagacaatggcaccgtgatgtaaagccacagagaccaaagaccataacattttacttatcgttggcacagagggtagggtaggaatggcgtacccatgtcgagggttggcatttaggttcttcagggcagttgtttctacttgaaactataggacatattgaggccagatcttgaacaaattaacaatcttttaagaaaagacaaggtttcaatgcaaagcaaatgtggctgccaacgctcttgattcagacattgcagttagaaaatcatcttttgttgcttaagtgtgctctcagaatctctcttcccaatccacattggaacagataatccaagtatattttccaagcaagttcagtggtctttccacagaagaattctggtgaataagattttctccatctaattgctcaatgaagggaggaggcagaattaaatattcagaggtctcgaggggaggttgggagagggagtatctccctgtggctgcattctccaaattgacttttgcttctctctccagagactgtttgggcctcaccacctcagcaaaaccttccctaagtgcccaggctgggttaggggccccttctctgtgcgtgcgactatgtatttcttgggaaatacataggattacatacagtaacatatatttacatacagtgtgagctcctggacttcttttccatgtctctggcacccgacgtgagaatggatgtctggtggatgtttcataaatgtcagaaccatcttgtcatttgcccattttccccccacataaccagattgttctttcctggtttgattataagctcctggggaacagacctttgtctctactactgggatgaacatatgttttatacacagtaggcactcaataactactacttgttgattgattgacagattgctagaggactgaattcccaacaaccagtacaatagctggcagaaaaggaaacgttaaaacaaaattaagaaacgggcagagtttggggagattttgagtgtgtgggtggcagaaggtacttttaggttggggtcacagtgcagcgggccgagcaccaaagcacagatattctagaactggggttctacatcagactactactgtgagagccaagaggctcaaagcccccagagggtgactcattcttccagccctccgcctcctcctgcctgtccaggtcatcttgatcatcccattatcagaactgctggaggaatcatctggaaggcttgaagtgactggggggcatccgctgggttgtgagagctgctcggagggtcccttgtctgtcccagtccacctcctccacccaccttatgctgtcaccccctgcccaggactggacctccattcaactcttctgagcagaaggagcagaaaccatcctatctctgcactggcctggaatggacagtgctccccagcatggttctagggagttgctaaggtctgctgccccagaatcgtttctctgctggtctgctgtggtttgggttgccagataaactgcaagatgcccagttaaatttgaatttcagatcaataaataatgattgtttagtataagaacatcccatacaatatttgggaaatccttatattaaaatattatttgtcgtttatctgatatttaaatttaactgggtgccctgttttttatttgcggaatctggcaccccttgttatggcttaaacaggtggactatgggacttagtcagaaagcaaaatcagcataaagcgggtgagatggcgtgagtcactgatgagataagaacgattctaaatctcagccggaaaccacctattggatgcacagtgatccgcttgtgtgcatctggcagcttggaaattctaccacgccctcgccaagggcacgcttagacgcaggtgtggttggcacgggttctagagagtgcatggttaggtgcttccagcagtatgggagggcaggagggaggaagaaagggaggaagacagcgtgcacatgtgctttgtggttattgttaagtaagcagaaacacccacacaacggaagtgcatagaacacaaggctgttaaccttatacatatgtttctctctctgtcattctgtttttcttccttttcactcatcctctttcttctcttgctacttacttacttacacagtccatgatggtggtaaaatggccacgttgcagaatacagaggggcgtgggcttccgaaccagacagcttggattttggttctggctctgttgcttattagctgtgtcatttaacctttatgaaaacctgtgttagttctctattgcagctgtaacaaattaccaaaaacttagtggcttcaaaaaacacaaatttactagcttacagtcctacagattagaagaactaaccttcttcttactcagctgaaagcaagggttcactggggctcactgggcagaaatctagtcgtcagaaggtcactgggatggtcccaaggggaaaatgggggaaattctgacagatttatttagtcactttatctataagcacagctgcttaaggaaaccaaatggcctgttgccacacacaacctcgtgaccattatcggataccagaaagtccaggcctgctcaaaacaagtgcagactggagtaggaaaactacagttatctttagatcaccaacatattattataatactaaaaaatcctcccctaagaggagaccaccgccattttgcatacatatgaggtaggaagaagcatgtttgtgaaccgcgctggcgtgtctggaactccaccctgtgcctgcccacatacctctctgtccagcataaagctcccattgctccccctgcctggagagaaggcatctttagagcacaagctccccttctccattctttggccattgaataaaatctgattgcttctccaatcaaatgttctttttttttttttttttttttttttttgcagccagtataaagtagaaaaagaacacaacttattggtgccaagaagggctgcgttcctttctggaagctctgggggaaaatccatgcttgccttttccagctgttagaagctgcccacatcctgtgggtcaggagcccttcctccatcttcaaagtcagcagtaaggggcaaagttcttctcatgctgccatctctctggttttccgcagccaagaaacagttccccaattttaagaacttgtgatgagattggacccacctggatagtccagggtactctccccatttcaaggtccttaaatttgatcacatctgcaaagtcccttttaccacataaggtcacatattgacaggttcccaggatcagggcatggatatctttaagaggcccttattctgctgacctcagctttcacatccttatcagtgcctatgtcagagatggttgtgagggcagaggagttagtacatgtaaagtgttgggacaccgtctggtatacagtaagtgttcatcgttactgcctctgctgagccaggccttgtgctcagtgcagtagcagatgcaaaggtaaattcctcgtacccttccagatgctgccagtgtagaagaaggcttcttggcaacactgaatttcccttccttgaatctatgctcactaggcagccttctgaactgcatctggtcctgcaacagacgccgccaggaggaagtagcccatgcaagtggtctagcatgggccctgcatcctccatctctgaagacaaacttcaaaatcagactttgggtttgttgatctatttcttttgcacttggttgttggaagcctgttccctagagggtcatccttgggtaagtgaccaaatttcatatctgtgaacttggaaagctcaaaattcctgcctcaaggttcagccattctagaaatctaccccaggcaccacacatcgtttcattggaacaaagcagcaactgtctgcaacatgtaaagatgttatgtgaaaagggtaatgtattacctcagcagtatatctacctgtgctcattttcacatgagcaaagtccaagtcagcagacccaaaacagaggtactcctaagtgtgtatgtacataaatgtgtgtatatctaactaggtatgtaggtaagtaggcaggtagatagacagacagacagacagacatggaagagattcctcatttccttcaccttcagcagcagaagcatgtttactgttcatcacaacaattttataacctatttagcatttctgaggtctctctagctacaccactgaccagcttgtgttaaccccctgcccccaaatatagagaacgtgtgtgaatatggaaacttatgccattaagagatgtttctctgggaagagtgggggttgggtgggtggcgatgaaaacattaaacaaatgcataatacagaataagttggtgagatttcatgtttggtttttgctgctgcagatatcttcccctcctgttttgtttgttcattgtgtttttgtttctttgcctgcctgcctgtttagacaaagcagaattatcaggcacccataagacaaacaacctacagaggcttaatgaaagttagcgagaggacagaagtgcactgtctgaaaaagggagaggctgaaaaggttgagagattttaaggtgggcttcctgtagagacagtggagggaatgggggtttagtaaatgccatgagaattaggtactcatgcaaggctgagtgatgcagaaagggaggctggactttgggaaccaggacaccccaccctggcacagagcacagagcccaaacttgaccaaaacagagactggcagccttgggcagtggtcatatcagccatgtccagcagagattgaaaaccatggggcaccctgcaaatgttctgtactgcataggaggcctcccaggaattctggatgactgcacctcctccactgcaccgtcaaatgggtgctgttgaactacccaccagccatgctgctagaggcctgctaaggtgtcttctaatgcagagaaaatactcaagcctgagccagttatgttaaataggaatgctgaatcttcaggaccaagaatgtttaaaataaggaatcaccattttaaatgaagagaaaaagtgagaattgcaagcaactacaaaaacaaacaaacaaaaatgaaacatggctacccatctcaacggtgacgaaggcttcctggaacaggggaactagcagcaggcaatgccattctgagctccatccctggatacctcctttgatcaggcaatgaactactggagctactcttggactagatctccagccccctgatgccccctctaatccatcaacctcatctttctgaaatggaaacgtgagcacacttctctgcttttcaaaatacttctgcaagtttccatccatcaacaacaatggtgtttctcagactgggtacacaggctccaggatggtatggcaggacaacccccaggtaaatgtgcaccagtcctagagtttatcaattttattttcacattggtatatgtaaaagagtagtacacaaacttagcttaagttttaaagataaaatatgagactccctcaaagtgttaagcctggaaaatgctttttttgggctttgcctctggagctgtcagatttcctgttccttcatctatgcttttaagagatgaaaagtttaagaacccatgggacaaaaattcagattccatgggagtgctgcatgagacccgtctggctttacctcttatctatatctgcagctcctttatcaattactccatgatacaacttgctctttaggatagaaactcagagacttactctttcaagtggatgtcccatttgctcacatcccaagcctgccttgacctcctttcttcgtctcacatggcattctgtgctaattgctccccctccaacacacaaacacatgcatgtgcacacatgtacacacgcacacccagcatagcatttaaaatcctctgggtaataatcagaaaaaaactccttcaataataaagactaacacacattgagggttgactacgtgcctgtgatacttccaaacacttcatcttattagctctgccccacaaccatgatagcgttcccactggttggtgaactgttcactagacattgaattagtgaaagcagttctctatgactgacagccagaatgggatgggatatgggaaagacaaggaaggagggagaagtggactatttagtgttctcctagggcaacttttagtcagacctcatatgattaagacacaaagatccaggtttctcagcctgcgtggacatccacttgggagggtccaaaggtcttgggaaggctacaattagtaagtacatctttatgagtcaaatcacattgctggggggtaaagtccagattagatgtcagtgtctctatggcctggtctgggtcctgagtcgcgagatgcaccgcttcatgcttttattaggaacctgataaatggaaccatctatctttttattctcattctttaacgctaatgaaacagaagtcaggcttggaaccttgaaccttgtttagtgactaattccagccactttctgtgatcattacctgtgttgctccccactttaaatcaattgaaattgcactcttcttgcaaattggaatcacatcagttcacttttccccccctattcatttggaggtttgaaaagccaagaaaaaaaatttccagaataaaagaagtctctgggatccatctctgcacaaatgaaaaataaacctcccggttcttaacccttggcagtcatttttcttataccttgtcccaaaaggccagtttcacacactccattaatgctggctgccactgggacaattacagacagacagcttttcccatttgagcaacttcttaaatttaaaaagcaactgtgcaggaaggaaggagacatgtggctgctctactacagaccttgtaaaaggaggttcttctatgctattacccaccccctcccatacctacctttcctaccacacacaagagctgaaataaaagttgcatttcacttgtgttgtggctgttattttattttacactccttgcttaaaaaaaaaaaaagtcttcacttaaaaaaaaatacatcacccaaacatgtctgagattttttgcaaggcttgggtctgaacccagtgcctttgataggggcatttttcttagcctgctgtggctaaagatgggcatggtcggatttcactcgcttggattaggatggacttggccctaatattttgtttcttaatgattcttccaatttttaagtgtcccaagagatagctttgactttccaccccagcctgctgatgttatcttcctaggaactgctacatcttttaatacaacctgtattcaagttctccttataggacctgagagattcaactggcagcatttaggactaccaggaatctccagtctggcgttgagatgagacgcctgcagaaatgactggaacatacggcagagcctctgtggacaagtcactcaaccaccccagagctcactttctctatctataaagtggaaatagccataatatcaatatcataggtttgtgaaatgggtcaataaaataaagcatgccacatatgttacataacgcccagcatgtagcaagttgttagcaggaagtaatgacagtgataatggtgtaaagcttgggatgggggacataaagaagagaagttactccgtttgagagaaatcaggggtgacctcatagaggcggcagcattacaaagccctgtagggtttgacaggctcaggtgcaggtgcaggggagtgcaggaggcggtgaaggttgaagggagagaaactgaggatgggatgacaacaggcctcagggaagagtgaggagaccatttcattttaactgaggcataaaggggatgaggagggcagaggaggcaagggctgcctccaagagaagcccaggtgccagggcaaagggcttgggctttctctttgggtgagaagaagctatagcagacatggagcagatttctcttgaagcacacactgttttatctaacaggctgccttccagagcagtgatgtctgcatcaaagtcatataatatcagagctgaaaggcatctgaagaatcatctgatgcaaacccttttttaaagatggggaaactgaggctcaaaaggaggagtgatgttcaggcaaaggctccaggaccacatatcaccagggagcaggagaggattcctacactggggatgaaggacatgtcctctgtgtccctttcattttatggcttctgagatcctcgcccagtcccctgcacccacagcgatagcaaaactctctcggggagaaacatgggtcctggcagctctcatcttcaggggattaaatcctatgcatacttcaatatccaaagaagtggctccctgaacctaccttactgtcagaatcattcgtgaagctttgtaaagatgtgggcaagtgagacctgtcctttgagctggggattctgtaggtctgagctaaggtctgtgcatccgtgtcttttttttttttttggagacggagtctcactctgttgccaggctggagtgcaatggtgccatctcggctcagtgcaagctccgtctcctgggttcaagcgatttccctgcctcagcctcctgagtagctggggctataggcacatgccaccaagcccagctaatttttttgtattttagtagagacggggtttcaccatgttggccaggctggtcttgatctctcgacttcgtgatccgcccacctcggcctcccaaagtgctgggattacaggcgtgagccaccgagcctggcccgtgtctttagcaagatattttcagaagctccgtgctccaagaaggtgcccttcatttctcccgacagtggggagtcccctcctctttcccagcgtattacagttcctttgcaatgatttttctcccttcttccagaaaacatatctgagttacctttgaaactcaccctcattcattcccttggccctaggacaatttttgttgtttgtttacatgacagatactaaatgaaaaaatgtttggtgaatgattgaaggaataactgaaatactgtgcaaatcaatgaataatggcaatagtagaagctactattcttagcacttgctctgtgtcagacatggctaaatattttttatgtgtgtgtcatttaagtcttgtgtccctatgaacaaaatactattttcttcactttatagatatgggaactaaattcagagagatgaagtgacctgtccaagttcgaacaacttgtaagttatggaataaataattttttaatgggtgaataaacaaatccatgccgctcgttctgtgatatccagggctctagtgctgtccctggctggcctgaaaaagaagcaatgttgctctcttctgctctctgccggccgaatgtagtgtagcacaaagagctcagaagtctgtcttaggccctgcatttgtggtctgagcccagaaattgaggaatcacgtgaccttgggtaactcatttcacttttctgagcctcttgtttctttgtcttaaaaatgagaatgacaatctcatcaatgaaaactacttggggatttgggggaaaccgaatcagataaacaaaggtgggcactttgcaagatttggacacaatagttacacaaataaaagcgtccgccttctggtgttgtggagattaatgacctaattcttgtaaagtgcttagaccagtaccaggcacatagcaagttaccactcaatatcaattaatgttatcatcgttatttccctttaaccctttagtgactcatcttctttattctcttttcacctgtcatgctccatctacctgaaatcttcctcttgtctgacacattgctcctccagctggatttgggcataggctcagggtggctgcagtgtgttgtaggaatgtgagaggtaccaggatgtcctgtctactctggcatcaggaattcccaaggggtatctctggccttgggctctgcacgggccccgtgatcagctccacacctgtttgttccaaggaatcatgagcttaagcagagtttggaagtctttgaaaaagcctgcaacctggggttcttgccttgggggacacagatgagcttcacggcctcccacatttgcttgcttgggtttataggtacatctcattttattcttttttaaattaaaaaaaaattgatacagggtctctgggtcacccaggctggagtgcagtggtgcaatcaaggctcactgcaacctctgcctcccaggctcaagccatcctcccacctcagcctcttgagtagctgggactacagacgtgtactaccacaccgggctaatttttgtatttttcgtagagacagggtttcaccatgttgcccagactggtttcaaactcctgggctcaagtgatccacccacctcggcctcccaaagtgctgggattacaggtgtaagccagtgcacctgatttagcctcattttattgcactttgctttactgtactttgcagataatgcattttttacaaattgaaaatttgtggcaatccagcgtcaagcaagactatagatgtcatttttccaacagctgtctctatgatgtcacatttttgtaattcttgcaatatttcaaactttcttattattactgtgtctgatatgacgatctatgataagtgatatttaatgttactattgtagttgttttggggcaccatgagccacatccatataaaacaacaaatttaattgatgattgctgtgtgtgttctgactgcttcatctctttccctttctttgggaaattgtttccctgagacacaacaatattaaaattaggccaattaataaccctacaatggcctctaagtagtcaagtgaaagaaggagtcacacatctctcactttaaatcaaaagctagaaatgattatgcttagtgagaaaggcatgtagaaagctgagactggcctaaagctacgcctctttcactaaatagccaaattgtgaatgcaaaggaaaagttcttgaaggaaattaaaggtgctacttgtgaacacaggaataagaagaaagtgaaagccttcttgctgatatagagaacgtttcagtggtctggatagaagatcaaacatgcccaacattctcttaaaccaaagcctaatccagagcaaggctctaacccacttcaattctataaaggatgagagaggtgaggaagctgcagaagtagtttgaagctagcagagagaggctggttcatgaggtttaaagaaagaagccatctccacaacataaaagtgcaaggtgaagcagcaagtgctgatgtagaagctgcagcaagttatcgagaaaatctagctaagataattgatgaaggtggtgatatagcttgaatacatgtctccaccaaatcccacgttgagttgtccctcccattgttgggggtggggcctggtggaggtggaaggtgtctgggtcatggaggtggatcccttatggtttggtgctgtcctcctgatagtgagtgagttctcctgagatctggttaagtttgtgccccccatgccactgcctcgcttgcaccttcttttgccatgtgaagtacccgctcctgcttccccttccactgtgagtggcatgctggtgccatgcctgtatagccactagaatcatgaaccaatttaacctcttttacttataatttacccagtctcaggtatttcttggtagcaatgcaagaacagcctaatataggtggctacactaaacaatattttcagtgtagacaaaacagccttatattggaagaagatgccctctaggactttcatagctagagagaagtcaatgtctggcttcaaagcttcaaagaacagggtaactcttttgttagaggccagcgtaggaggtgacttaagttgaagccaatgctcattcaccattttgaaaatcctgggacccttaagaacatctattctgcgcccatggatcaagaagtaattttgacctttaagtcttattattcaagaaatatattttataaagctatagctgccatagatagtaattcccctgatgaatccgggcaaagtgaattcagaaccttctggaaaggattcaccattctagatgccattaagaacatttgtgactgatgggagaagatcaacatattaactttagtgggagtttgaaagagatgattacaactctcacggatggctttgaggagttcaaggcttcaggggaggaagtcactgcagatggggtggaagtgacaagaggactaagaagtggagcctgaagatgtgactgaattgcttcaatctcatgaaaaaactggaacagatgaagttcgaagtaagagttgttttttatgggtgagcaaagaaagtggtttcttgagatggaatctactcctggtgaagatactgtgaatactattgacgtaacaaaggattgagcatattacataaacttagttgataaagcagcagcagggtttgagaagattgactccagttttgaaggcgtgggtaaactgtgggtaaaatgctaccgaacagaattgcatgctacctgttaaatcctttgttaaaggaagggtcagtctacatggcaaacttcattgttttatttttaaaaattgccacagtcccccagccttcaacagtccccatcctgatcagtcagtagccatcagcatcaagctagcaaaaagattacagatcaccaaaggctcagatgatcatcagcactttttagcaatgaaatattttttaattaagggctgactttttttagacatactgctattgcacacttagtagaccacagtataatgtaaatgcaatttttatatacactgggaaaccaaataatttgtgtgactcactttatattgactttattgtggtgatctggagctgaatttgcaatatctctgaattatgcctttatatctgttctctgtgggttgaggagagttttcattaacatctccaagttctgaactatggtgcctggttcaatccacacacacacacacacacacacacacacacacacacactgtagaggtgagggtgtcacagcccagaaggaggaagagaggaattggcctaaagttgctaggggtgtcagtgggactttactgcagctcctgacacccagtccacagccgatcactacaccatattctcccaagactgtctgactctcctttgcaaaaagagacagacttttaaatcaggattgccctatgtcagagggcgtgttccctgaggttcggtgaggagtttggccctgtccagaaggctctgtaccaggtgcacaggagcagctgcatccagctggaacctcagagcaaatgagagtgcccacatcccagggggcatcagtcagcgggcatcccaggggcttctcttagcttcagaaaccctcccttgtgattcactaccaccctgggagacaaatggagcaagtgagtgcctctccatttaacagatgggaaaactgaggccctgagggattaagtgacttgctcagagtttcacagtcagacagaggcagagctgggcagcccctcagctctgtgcattttgtctacaagcaaggtgactttgggtttagtgtgttcatgtttcaacaagaatgtaagtttgggatcagacatatgttacccctgttggatagtagctttgcaatcagtctttgcaaaaaatatccagaacaaggctagaacaaggtggtacagaaacaaataacacgtgttacagttacatatgagcttggattacctcctttatagaaggaagtggagacatccttcatgcagagatttaggatctctcactagcactaaccctcttgcccccacctagtgtttattccaatcacccctgttgctttttatcaaatgaaagatacagatccacttttaagagtaaagaagagaggaagcacagtttattaattacccattggtatcccaaggacttgtgcttccattatctcattgttttattcattcattaatccaaacactcattcagcagggatttcttgggggcctaccttgtactgggctctgtggtcctgggagatgcagcagggaatagagtcacaggcttgcactcatagagagaaccttctagctggggagacagacaacaatgacaaaaacacatagcactaggaagggagccagtagaatttcaggtgaagagtaatgggagatgggaacctacacaaactggagagacccaggaaagcctcctgagaaggtcctttaagatgagctgtgaggccaaggaagagcaggccaggcgaaggcagaggggacagccttccagtgagtggaaacagcaaatgcaaaggcctcgaggcggggcagggcttgtgcttttggggagcagaaagaaggtcacggaaaaaaaacagcgtgattcatggagagaggcccagggctgaaaagggagaggcaggagtggggctcatggtctctagaaaacagactgggtttgagtttgtgtaatagcctggtgaggacggtattattatttctgcttccattttacagttacagaaacagagggcagcatatgatactggggggtactgggatagggctgtgttattgattgatgggggacctttgacggtcagaaatggagggaggctggtggtgtacccccttgacttcacctgaatgtcagggcaaggccaggagcatgcaggaggcttaaagattgggaacccctattcttgggccttctccccattctttctggagcaattggaagaggcccatgggagggaggtgactgtcatgatgtcccccactatgaactatgggaatggctggagggtcactgggcctggtgctccagctgcctgacctgcagggaagtggtacctgcaggacctacagtgagggagtgttgacaccctggctctgggaaggagctcatggaaagttgggtgaacttcttgttagactacgcaggctttcagaagtgcattccatacggagtggggtggcctccccagggaggagcagagggcagccactggaacaagctacagctacaaaagaccacctttatccctctcaagttctcccaggggcccctgtgtctgcctgtactagaggaagtttccaaaggattttcctttccccaggatgaagaatgaggccacactgccaaagcaagatctcgtgctatgtgtgattgaatctcctgctgggcgccaagcaggaatctcatcatttccccacaggccctgagagcacacaggcctcatccccaccccaccacagtgcagtgcactcactgcagagccaatgaggcctgagctcagggtctgcgtctgcctgcatctgcatggccacttccatctgtggtacttgttagtttattttaaatgtgcgatttgtttggttgcattttctccttctaaatatacagtagtttttgcatgtaattatgtattttttaagaagggctcccaaattgtgcaagcttcaggcctcacaaaactggattggcccctgccatctataaggaaaaaggcaactggtttgtgaagtgctggcctggctgctcctccccaggaaccaaccagatagggagtttcttaggtgaagctcagtggtctctggtcccgatccacaatgataaactggcctgcatccagccccacctttctccttcccagttgaatgcattttgttcaggcatctgttgtcatgcacacctcagaagaaactgactcctttccctggcccaggggagcatctggttggcctatgatcatttcactccccttattcataattggttaagggcagagtttctcaacctcagcacacatgtacattggcggctggataattctttgttgtggggctgttctgtgtattatagaatgtttcacagcatccctggcctctactcattaataccagttgcacctccccaaattgtgataatcaaagatttctccaggcatttccaaatgtcccctagagggcaaaatccccgccacaatgtatatgtgggttgggaactaccagtttagggtgaccctaattctggccaatgagacttgaaagaaactctgcagggcccttcctggagcatttcaaagattccccataattttccaatgatgcccaactccttgcagcagtgagcaaggctctgcgcagctggagggctggtctgtgtctcagctttgggctgttactcacgccgttcctgcttcctgaaatcctgaaattttccttcacctggtcggctctagtcctgccaggttcagaacccaaagcctctcctctgtgttattctggtgtcgtgcacatatgcttgtcactgcatttattacagtgactggaattattaattcactgtcctctgtcccctactagaacataagatccttgagggcaggagacacactcatgctgacatctctagtgtcgtctagtggctggaacatggtggagcctcaataaatgatatttgacctgtattaactttctgcccctcactttctcatttataaaaggtagtgcttgtacaaggtgacctttgtagaactctatgactccacagtcaggggccagttccacacaggatggcatcagtgacatctttttttttttttttttgagacagagtctctctctgttgcccaggctggagtgcagtagtgcaatcttggctcactgcaagctccgcctcccgagttcacgccattctcctgcctcagcctcctgaatagctgggactacaggtgcccgccaccatgcctggctaattttttttttttttatttttagtagagacggggtttcaccatgttagccaggatggtctcaatctcctgacctcgtgatcagcccacctcggcctcccaaagtgctgggattccaggcatgagccaccgtgcccagctggcatctttctgtgatgacatttctgtgagcaggcatctaggagaggatgagctccattttcccattttctattctccccacatccagaagacctgcgtgcggcctctagaaatcacattaaatctatcaattagaaataacaataatgttagaataatcttcatgttttagtcctgatagttcaaaaaagttaatctcttgcattcactcctggcttaatgccacagtcaaattagatttatgaatttagcatgattgcaagagaacagatagctgcatgttctgctgagccagtgcaaacctttaatgtttaattaagaagtggaattaggagttaagtatgccttgcttgggatattaaaaaaaaaataagaaatagccttaagtcttccaatcacagccaacttccagcctctccagcctgccaagattattctcaggggagataactttggagaatggtgcttcccagtactaaggtaatgctgtctttattttaacagtgaatgaagtaagctatacaagcaagctgaagcacttcaacatctgcccacagctcccatccattgcaagagatgtaattgtcattgtattcttttgctagggctgcagtagcaagtgctacatattgagtggattaaacaacagaaatgtactgccttatagttatagaggctagaagtttgagatcagggtgtcagtaggccacgctgccctataaggtgctacagaaggatctgttccaggcctttctcctgggttctggattctggctcactgcaagctctgcctcccgggttcatgccattctcttgcctcagcctcctgtgtagctgggactacaggtgcccgccaccacgcccagctaaatttttgtattttagtagagatggggtttcaccatgttaactaggatggtctcgatctcctgacctcgtgatccacccaccttggcctcccaaagtgctgggattacaggtgtgagccaccgcaccttgcctaattttagtttttaattcttttgaagacaagttcttgctctgtcacccaggctggagcacagtggtgcaaacatggctcactgcagccttgacctccctggctcaagtgatcctcccacctcagcctcccaagtaggtgggtctataggcacatgccatcatgcccagatagtttttttttaaaaatcttgtagagatagggtcttgttctgttgcctaggctggaggacagtggcataatcatagcacactgtaaccttgaactcttaggctcaaatgatcctcctgcctcagcctcccaagtagttggaaatacaggtgcatgccaccagggccaggtaatttttttgttttttacagagacaggggtcttgctatgttgcccaggctggtctcaaactcctgggctcaagcaatcctcccacaatgagattaccactgtgccccgtctcccctttttagaaggacacagttacatcggattaggagcccacccttttcccgtagggcctcatcttgactctaccaattacatctgtaacaaccctatctacaaataaggtcatgaggtactgggagctaggacactccaacgtacgaatttagggggaggaatacgatttaacccaataacagtcagcttgatagaaaatcattagaatatccatacatttgcatatagattttgcttttagttctttacacaaatctagctagttgtttttggtacacttctgctaataattctccatactctttctgtttttgacttctaaggatcttccataaaaggctctaggctagaacctggtctacaaattatacaccctggcatgtccaaaagcaaaatgctgcctacatctcctgaaaatgcaggaatgtcagaaaagctgctgaagtggtggctaccaggagctccaggggcctagcacccactcccagcccgaccctggggtggggaggggggtgctcttcagagtggctcattttagagctgactacccaagtgcagaagaaacaacgttttaaatatatcgggcagcagagcagctagatattaaggttcttctttgcaggacatcatgaaatattgttcatgacgaccctgaccctgggttgggcgcgggtgctcttcagagtggctcattttagagctgacttcccaagtgcagaagaaacaactttttaaatacgtcgggtaacagagcagctagacattacggttcttctttgcagaacatcatgaaatattgatgttaagctaaaacgaatataataaatgtatgattgcctgctaaattggtcattatcttttttagattctggctttgacagaaagtagcaggccccaatggtttaagaaagaaaggaaaaaatttttttaattgaggaaatcatatccacgtctttttttttttaattgttgaaaagatgtccacagtcagatttcagaggaagaacaaattggtcccagtcaagagcaccgtcttgtgggaataccattgtgttctgtacggagctggaaaaatacataacagcaggatcctattgtgaaaccagatattatgcggaagtctaggcatgagacagatgtaagtggagctgtcatatcgaagcagaaatagcagccctctggattgtcttccccctccagcctttatcccagcaccatggcaagcccttgaagcaagaaagtcctgctaactgcatgactttggtctagtcctcacgttctggttccccctgggggggcttagtctttcactgagaggagagacgtgtacacacggatggaggtcagatttcccccctccccaaccctctctaaggcagcaggtgcgtttgttgctttccagataagtagaaaccaatccttcacccctggagtggtcctgagtgggctcctgatctaccatgccctgctcccacacccagcgtgaagatgaatggcttctctccaggccacctcgcgctcctccatccatcactgctgcatgtgtggccctcaacagccagaaggcttctgtctccacttcttcaatgactctcctgccttccccagccgtgctccagcagccccctctaacaccctgctcccacctgagctccaaattaccctgacagctagtccttgataggggatgattggggaccatgtttccaatcaaggagtgactagctgtgaaatcccagactccaaagtacttgctgtctcctggaaaacaaggaatgggcctagccaacctgatagggattgtttgaattctgagaggaaggaggccggcagacttggtccttttatttatttgaagagagtttgttgctccttggttttactgtaccccttctggtcatttatttcttagctgatcctctcaaacctctagatggcagagtccaccagccccattggtcaggtgggtagactaaggccttcagacagcactcaaacaagattctcggcagcgtctgatatggtgcccatatctctgcttagctatgtcaaaaaaggaccaggcaggaggttatgcggaagggcctgttctcagctgagtggctgctgctctcagtcacgggggaccgggacacgggggaccagggactcgctcacactttgctttgggaatcggcctcctgcatgagcgtgggccaaggctgtttccccacttgacgacagtgttcatcttgttcccacctcggaagtgggaggtcggaatcctcagctccagcaggaggaagagcctgggctggagtgggtttctgagttcttaacagctgcagcagggaattctacaatggctggaggagtaggcaacactgaagccaggcaggggtatgaaggtgcaagtaccggcacaggtagcagaaagatggccaaagagcacgctattcttgataaaatcacactgtattgggggctgcaaaaacctaggattcttcggatggagaacctataggaggagttcctatggagagcacccagggtactttgcgggtgagggtgtaagggctccccctgctggggtggagtggaacaccaactaatctcttgtcctgttcagtatgtaattctgtacaaagtatctggcaaagtcttggcccatagggtttacagccccagctgtgcttaatttctctctctccttctccccacctgaaaccccctcaggctggttgagatccatgggcaactctgctggtcctcagtgctcctgcagaagagagaagagagctctcttggcattcctgcaagcagcctcatgtaggaagagcccagctctggccttgcagtcagaatgactggcctgatgctgggatcacctcccaaacagctcctggaattggccttgtcctgccctactctccagtgtgcatgtgagagtttctgtctctgaatttccatcctgacttctgggaagcaggtctgaggtcagctcccatctgtgaattaggcttgggcagccagagtcccaagccatcaattgaattgggggtgaaaatggggacaggactggggtgataccagtagagttacatcagggaggggcaggggttgggaaaataaacctaaatgcagtctagccaagaacagtctagctgaggccatgaatgaccaagggaacctatgcgggctttggggttacacagacccaggtttaaatctcagtttttctattgactgtgtgtccttcgatgagtggcttagcatctctgggtctcagttttttcatgtacagcaaggacaagaggaatgctttcttcataggattgtgaaaaccgaatggaataacacttaaaacatctagaactgtacgaggcacatcataggtgcctgatgtgagttctttcttcaccttccctacattcttcagttcatgaacggagtggcgtcagtaccagggagttgtagcagagccctagggagttggaatctggagggagaggatcaggtggaagttgggttaccccttaggagagaggcaagaaggaagatccaaacaagagaagtaacagaggtggcaagctaccatgggctgctacccagggtgatgtttctcatgcgtcaggatagattcttccaacactgagtcctgctgtctccaccttattgcctaggaaggtccagcccctctctttccctgccacaatggttggaagtccctggtattgtggaagaggagaagatgggggctcttagaggaacctcccctccattcctattgtgccccagcccacgcagctctcatccccttcaatgtggctctgggtggcaggtgccaaaagatgaatccagacagttcatgggccatctcctctgcagccagagaataagagaggataattattcattggatgtagtttacggcatttagttgcaggtcctgtgctgagggatggtcacagcccaagcctctctaatgacctggagagcagagaaaaggatgctattattctgtttattgagaattaagataaatctggttagaggagaagccatccgctatttggctcttcccaaaagcaattacctataattttgctgcttcaggaaagaaagtcactagtatttgtgggaccgaaaccattacatgcaacctgagaaggcccagaggagattaatcatagcatttttctcagtgctgcatcaatctcacttcctctcaatttgggctcaatttacaggctactcagttccccacagatgcagggagaggggaatgtgtgtgttgggggtggcctgagggttaattggaacattttgcaaaccacctttatcaaagcagaggtagcctgctggcctcttagttcaaatggtttcatcctgtccagctgagaggtgtgttgggtctggagacttcgtgttggttttgtgtagttgtgtgtgtttagattaaagatcctaacttaatggggcaactgttctttactgccctgttgcggcccactggtgtgttaggatcaattgcaaggtgtgttacaagtaagtttttgctactaccagtaaaagtactgaagtttttgaataatttacctaagaaatagtttccgacagaatgaatgttaacttaacagtattagtacacccactcacctgtgatgtacttaatggagcaggagggaacaggctgccatcaaagctaactcctggaaatgacctagaacccacagcctgtctcagccgtgctgcatgttccagcagggaacaaagcgactgttgtattatgtaaaattacttacctgataataaaatgtttgtggattggataaatttgaacggatatattgtttccttcaccccacccccactagtggcaaaagctgctctgtatgaatctgagtacatttctgtgacagtattcctcatatgtacagcattctatgtgaatcatctcccaaaaattgccatggggtcattatccccagttcttaactagagaaactgagattctggaagtccctctgaatggcccatacttccccaggtgtctctgcaggaaacaatgtggacaatcacagtagttggaaggacaatgactgacctaatggagttcaggacgctatgactgttggcacctgatgtgcacagctgctcccatctgcgcagagagaatataaaggcagtggcgctgaaacatctgctgctttcactcaccatcaagatggaactgactgtacatgcaagcaaattttgatgaagagagtgatctcagagtgcgaagataagttgtttctccttgacacctaggaatgcacctggccaagaccctcagttgaaagacaatatcaaataaatgcaaaatctaaatatccatgtgcttgtttacttttcccccttagataatggactgtagccattgcatatttatttattggtttaccttttagtagagatgaagtctcactatgctgcccaggatggtctcaaactcctgggctcaagtgatcctcccacctcggcctcccaagtactgggattactggcacgggccacagcacccggactagcctcatggtatatttaaaagcatccctaacctctacacgctagatgccagtacacactagacaccacctccagtggtgtcaatcaaaaatgtctcagagacttagactcagtaatatgtatccctctttcctctatccttcagtcattcaatctccacttctacccctgccctggaggcaaccaatctgtaccaattttctgtgtatcttttctatagaaatattagattgagatgattccccctcaccccagacaatatgccatgtccagatccctgcagccagtatatattaccttatttggaaaaaaaagtgtctccacagatatacttaagttacaggttttgagatgatatttcatgatggattaccctggtgggccctaagtccagtgaccagtgtcctcttcagtgccagaagagaagacacagacacacagagcagaaggccatgtgatagaattggagtgaggtggccacaagccaaggaagctaagttgtgctgacaaccaccagaagctggaaaggcaaggaagatttctaccctggagcctccagagggcgtgcagccctgctgataccttgatttcagactccggtctccaaaactgagtccagaaacttttgttgtttctgttgctttaagtttcccagtttgtggtaacttgttatagcagctctaggaaactaactctctctgcaaatagaggtatatatattttttccacaaactcacaatgataaggcacattgttctgcaccttgcttttttaacttaaaattctattatagaaatctcttcatatcaatatagcttcatttatctattattgtgtaaaaagccactcaaaaacatagtgacttaaaacaataacaattatttgttagctcatggttctgcaaagtgggcaggactcaactaggctgggtcatctttgctccctatggcaccagttgaagctagaatttccaagtctgttttttcactgacatttctcagctgatgcctcagctaggatggctaggacagttgggggcttttggcatcttttgctcttcatgtggtttctccatgtggatgcatgggcttcttcatagtatgatggctgggttgtaagaagtgttcccaagagagaaagttccaatatgcaagctcttattaagcctccatttgcatcttgctctcaatgccaaaaactagtcacatacccaagcccagaaacaatgcgggaggggactatacaagggtttaagttttgagaggtatggtttgttgggggctgtcaaagtaagtctaccacaagtagacttgcatattttcatttcccaaaatttactttaggcatgtaatctagacagttactcttcattgttttttttttttttttttttttttgagacggagtcttgctctgtcacccagactggagttcagtggcgcaatcttggctcactgcaagctccacctcccagattcacgccattctcctgcctcagcctcccaagtagctgggactacaggctcctgccaccacgcctggctaattttttgtatttttagtagagacggggtttcactgtgttagccaggatggtctccatctcctgacctcgtgatctgcccatctcggcctcccaaagtgctgggattacaggcgtgaaacaccgtgcccggcctagacagttacttttcattcttaacagttaaatagcatttcattatctggatggactaatttattcagttcatatactaatggatatttatattacttccaaacttttgttgttaaaaatgatgctgcaaaaatattattttatgtatacatcattttgcacatctgtgagaatatcagtgtgctgaatacctagcaaaattgctggttaaaacagcatgtgcacgtataattttgatggaaattgattgactaattgccccacatagaggttgtaccaaattacattcctatcagcaatgcatgaaagcaactatttcccccacactccaatcatcctaggcatcaaacattttttgctttgccagtgtgataggaaaaacatagtatttatttttgttttcatttctatttctcttctgattgagatcaatcatgtttgcacatttgtaagaactatctatattttctttctatgagctgtagttatttcctttgcccatttttgaggattgttggtctttttcttgttaattttaaggagctacttatacattaaagtgattgtgcctttgaccataatataaattgaagatttttttttctgattttaaagcatgactttgttcatggtggggtttttgttctatgcagaaattggattctatgtaaccaaattactctcttctcccatggcttccacatattgttgtatttaggaaggttttccacattaacagattatatatgtgtgtgtatttatgtatatgcatgcatgtgtgtgtgtgtgtctgtgtatacatctacaactacgggtaacttaacaacagggatacattctgagaaacacatcgttgggtgattttgtcattgtgataacatcataaagtgcactaacatgaacccagatggtatagcccactgcacacctatgctatatggtaaagcccattgcttctagactacaaacctgtccagcatgttactgtactgtatattgcaggcaattgtaacaaaatctagaaataaaatcttatttctagaatacactgtattctatacaccatattctacacaccatactcaatacaccatattctatagttaggtaagcaaaacaagcaattaatatcaaacctgcaccccaaaaaatgttggtttgtatccttcctgtgctaatcaacccctcagttcctatcattatcctcttcaccctcttcacaggaactacaatcacagtatttatcttgcactgattacaagtctggatagggctggaagtaaatatactatacattattcctatcctatcctagttaaaaaagcaactccccacttcacagaacccactactaaatgattctttatacaagcagctgcatccatagtcctaacagtagctatgattattaacataaggtactctggacaataaacagttataaaagtcttgaaccaaacagtatacacaaataaagtttgtgtatctaaagctatctaaacatagaaaatgtaccgtgaaaatacagtataaaagattttttaaaccagtacacctgtatagggtacttaccatgaatcggagcttgcaggaccagaagttgctctgggtgagccactgagtgagtggtgagtgactatgaaggcctagggaattactgtatgccctaatgtatgactggcagtgcagtacgtttatttacaccagcatcactacaaacacatgaataatgtgttgcactatgatggtacaacagctatgacaccactaggcaatagaaaattttcagctccattataatctgatgggccatcctcatatattgtccattgttgacctaaatatcattatgagatgcctaattgtgtatgtatgtatatgtaaatcaatcgcatattttaaatctttatgtatttgtttttgcattaagttctttaatttgtctgaaattctttttggtgtaggttatgaggttattattttctggaggctcagttgcctcaatgtttatcacataatccactgtttatccactaattttaactggtatctttttcgtatactaaattctctcatgtatttggtttgatttgtaggcttgctattctgtcccaatgatctatctgtctattaatatccagtaacatatcttttaaaaatatcctaacattatatattctaaagttcagctcatcttgttttgtttcaaaaacaatctgttgttaattttatttagtactgcattaaatttgtagatgaacttagggagaatcctcttgatttttgaattttctttttggcccagtcttttccttggcctgagcttgattactcaaattaatctgtcaggtctaggcctgttgatgtcacacctctgataggaacatcctggggcaaattggcctggagctgtctgggtgcagcaggctaaactagagctcaggtgccttagggactggatggaggcagatgaaattgatactaggtatgtagtcaggggacaaagcaggatcatctcaagggtaccagaaggatctgggtagactattctgcggaccaggtctgaggagctcaaaggaatgttgagaaccaggagaataaagagaagaggggtgtcaaaggaaaggaagcgaacagactgtatgtctccctattgcagctcacttagaatctggggcgtactttgaggggctataaagagccatggaagacttggtataggtcaaggtcaaggtgaattctctctaggtgaaagggctgtgagtacacatgcctggtggagagtttgttttgagagatagaacagtgataggagagggctctagaatagatgtcagatcatttggattcttttagttctagtgtcacgaccaatttgttggaggatggtgggatcaatcatgtttgcacgtttttaagaaccatctgtattttcttcctatggactgtgtttatttcctttgaccatgctacttgcccacattacttgcttgctcatctataaaatcaggtggaggtggagtagctctaagattttttcccaatgcagtgtttcatggctctgtgattactttccagagtgtgagaaagattcatggcctcaggctatgggtaatattcccgagtcatctgaagtcccagccaaggccatggggtttaaaacgtttaaaacttcaacctggtgttggcacatttacagagtctgggaaacttgagttcttcatatgaaaatgcgttccatccaatggctcctccaccgtcaacagaataaagccctgatgtcttaccctgggacgggagcaccgtcatgatctagcctagcattctttttcagctgcaccacccatcctccctttcaggaattctgtgttccagtcaggctgaacttcttgtgatttcccacaagtgttaatactttcttgcctcagtgtttttattcatgttgtttccactacctgagctactcttcctcatctcatagccaaatccaagccacagttaagtgccaacctcagattttacctcttctctgatgctccctgttctagttgagatctgggggttataagtggaagagacccagtcaagctaactcaagcaaaaggaagtgtatcacaaagctccaatggataatgtcatatacagccagagagagaacagggggtgagatacatgtggagtgaaggaggactctaactgggacctggggatgctgtaatggatgctactgtctccatctctcagggtgagtgggattcccttcatctccagttacctctgtttttcctccatgcagcttttcctccaagcttgtcctccgtgtcttctcttctcctgtcctcttgttccccgtctcactcagcaaatagaatggctgccccacgctgcctacatgatttcctcagcacctactactgacggatgtgtcactttgtttaaattcttaacagaaggaatatggttggtaagtaatttttaaaggtagctattaacctaagaaaacagaaattgtatgggaaagaaaatatatcacaaaaaaagttttttgtttagtagcaaacagtatttataaagctattataatttaaacactgacttggtttaataaaaaattgaaatcaaatgatattgggagaataggagaggaggcagggagttggtagatatcaattaaatactcttctctcacaacagcaagttcatgtctaactctgaaaatccaggaagagtaacataaacaaatcatttaaaaatatggtggtacatccagaggcagctagaaaagttgaaagaggccactgctatggggttgtggggctggggagtggcagtaaatgtgcaggggattgatgtatttattatagggctttctgtagtttttttaaaaaattaaaaaatacatatgcatgcattacttttaaaattgctcttttaaaaattatgaaaaaatgtaaagaatttaacttttataaaaaagctttagttcttaatgagatgcactttcagaaatctggcaagctgaactatacagaaggtcccatttcctggggcttcccaagagtgctgctttcactggacaattaagcagatgaaaagttttgtttgtttttgtatcagacagattttacttacacataggcacacacacatgcacacaacataacctcacagataaagacatatgtcctccattccagtcccttaaactccatcccccaagcaattaggaacataaatttaatgtcattcttcctagtccacagtttttaatatttttactataatacatacacacatatgacacatctatacacatatctgttaaaaaatactaatttacttattatgttttgaaattttcatttaaatgttatcataatgtacgtattattctggtacttgctttactcatttaatatgttgagacctatctatattcacatatggatctagtgcattcattttatttcatcgtatgagtacagcagaatttattttgcctgccaacctttttactcttacaatcagtgtggcagtgaatatccttatacaaacctcatgccaacacatacaagaatgtcttctgcatgtatgcctagacacggaattgctgggttacaaggaggcacattttccttttactaggtcactgggtcagcatcgtttttaaacacaactaaatagcgctgttgtcagattctggctcctgggtgacaggcttgtacagactgacccagctgggggtggaggccgtatctgaaataccatctgtgtcgctgtcacaacagtgctggaggctctcttttcagaggcagcagtttaggaccggagcaaagagacacatttattcatgttctttctaacaagctggtgtttgacacttaaagggctgataaggttcttttcttttttacatatatgaggggaaagcactaggtaacatacaacaaagaagaccgagggaggatgagcaaagtagagttatagaacacatgacatgaacgaagaaggcccccatgggtgggaggtgggtctatacatttttccgttcgttcattatcagtacagttgactcttgaacaatgcagagttggggtgccaacctccatgtagttgaaaatccatgtcccccaaatttaactaacagcctactgctggccagaagccaaactgataacacacagagtcattgaatatgtattttttatgttacatgtattgtatactgtattcttacaataaagtaagctagaggagaaaaatcttattaagcaaatcctaaggaagagaaaatatatttaccattcattaagtggaagtggattgatataatttggatgtgtgtcccttcccaaatctcatattgaaatgtaatccctaatattggacgtggggcctggcaggaggtgattggatcatgaggacagattcacatgaatggttttgcaccattcctcttgatactgtcctcacaatagtgagttctcctgagatctggtcatttaaaagtgtgtggttcctccctccctccctactcctactcctgctctggccatgtgatgtacctgcaccccctttgccttccaccattattgtatgtttcctgaggcctccccagatgctgagcagatgccagcatcacacttcctgtacagcctgcagaatgataaacgaattaaacctcttttctctataaattacccagtctcaggtatctctttatagcaatgtgagaacagactaatacatggatcatcataaagatcttcagctcatcatcttcactttgagtaggctaaggaggaggaggaagcaggttggtcttgctgtctcagggttgacagaggcaggagaaaatccacatagaagttgactcttgcagttcaaactcatgttgttcaagggtcacctgtatttgtgaagaatgtgtcagacttggaactagactctggggcagaaagtaccataagaaagggacggttcccttttgactgatatggttgatgagatttggaaagcctacttcattcacattcctttccaaagaaacagcccctggccataggctaccacctttctcccaaccatggcagtaactgccctcatttctcactcttgaaaactgagtcagctgtttagaccagagagagtcccttgactaaggactgctgctcttaaagccacccaatgacctatgattcacacaccacatcaagaagatgagtggcaccaactatatgtatatagtgatatatcttcatatgatatagcaataccatgaaaagaactctgactgtcagtgacaagagactggggcccagagtgtattaataaactgaggagaacttttgcagtgagtgtcttgaaagggcttgattattttggttgtactgcacgttgtagatagatgcacatagtaggtgttcaattaagatttgttgattaagaccggttgagtagtgttcaatgcttatttagatgtgatgttggaaagtgaattttattaattacaaaattagaactactttatattcacataattctttgttttcagagggattttatatacattgttcattttaattttcacgaggagttataataccagcatgctatttagatatagttattattatataggtggttttcattaggaatgaatccctatagtgtagcggttaagtgtggatacaattgccaatcttgctttccatcccagttctacttcatatggggtttacgcatctcggtacttaagattcttcatctgcacaatggggagaaaagcagcatctacttcatcgtgttgtcatgaactgaattcatgaattcatgtgtgtgaaatgcttagaacagtgtctggcacataggaagttttcaaacgttattattagctgtcattttttttgttgttgaccaaggtggaagctgagattcaagaggatcagtttcatcccaggccaccctgccagtaagtgaccccatgaaaattagaaagctatcagtaaaagcaaaggagagaaagtgtgagacataagttttggttcccactgcaaaacatcactggtaactaaattggggtgaataagtacttgccagcctgccacatggggtgttgatgaggtttcaacaaactgatggatgtgcaaagtctttgaaaactgaagtacaatggtgtggctgcattgttctgctggggaggaaagggcacgaggctgcggtatggtgaggctgaatggggtctatggcttgggagaaagaaaggaaagatggagacccgcagctcatttcctgggagcatggataggcaacagtttggattcattacagagcccccaagcaggtggtgagaaaacgcagatgccccccctctgctttttgagcatctcatgttattcaacattgtccatatatttgtgcaaaatgctgtctcctcattgggagacttcaccggctccctgtgctactggcaggagaataggagtttcctaaaggggtctgttcagaaatgaaactcataaatgtattcctggtagagaaggaacaactggtttcttagccaactgagttttcctgaaatcacctccaaggacaagctctgagcctgtaacactggttctctcctcacaaggactccatgagtcatgtggagaagacatgtttaattctgtccagcaggtgaacaaatgggccaagagaagagaattgatgcacccagaatcacgtggcccatccttagcgtggagcttctggctcctgctgacactgctcccagccacacatggggtgcctgctgaacagagcccctcatgtctccttccccactactaactgtcacgggatgccagtctgaggcaccaaagtcggaggaacaaccacagtccaggacgactttgggaatccattagtgtgggatttgatgcatttcctaggaaagcaaacaatctctgcatgactttcgcagccacatgtccatagaatagcaacataatatttataatctcttatctgttccttttctacctttctccttgtggacaatggttacagctcatctacatgtctccctctctcccaaattcagcagcagagacatcacagatttctggttgggaaaccatggtctacaccacagatacagtaccctcaacaaggctgtaaagaagggggttgttggttaagaacatgggcttagtggcaagacagaattaggtgtgaatacaattttgttatttcttagcatacatttattgtttccaaatttcagtgttcttctctgtaaaacagagataataatagtgcccatgtcatgaacttacagcatgagaggagtacatataaactgactacaggactttcgtttttagcaagttagccaattacatagacttctggataaagtatcgtaaatatatttttaatagtgtatctatgcttaatggaaaaaaaaaccctgaaaaccagaaggttaagaaagacctaatattttggctaccctgagacaaggatgcattttctcaactagcttgaatttttagcagccacttggatatagaatatgagtccttaagctcacattaggcaaagaattggaactgagatcccagactaagctgggatcctcaaagggttggaacccttggtaaatggttagaatagaaataaatcttcctgccgactcagggaaatagcaagaaactttgctttcctctggactctggggaggtgaaaaaaaaaagttttctgttgatagtttgtaaccatgaccttgacctctcttggatttggtatttacctttattatatctgttcaggaaattaacacaaagagatccctagctggaatacccctagagcttccagcaaagcaaaatcaaattctgtcctgccaaatacaagctccattacaaaatacatgaagaagcaagacactgtaattgaggcagcagacagcatccatggaaagacaagagcccccagtgcttcagagaacagaattatcagaatggagaaataagttccatttgaaacaagtaaagacagatgcgaaaagggtaagatactactaataaagcattcacagggaagctggcacgtagtaagcaagtaatagatgttagctattattcatattagtgttagggttctgttttcatggaggaagggaaaacaaatctgaaattcaatccatgcgttgatcactagttcccttcagacacagcgctttgcaggctgaggagcatatgaccagaaccggagagatgggagggtccatggatgaaggtctggaggtaaagtctccttggtcccatcctgactactccccaaatgaccatgagaaaatccatcgcttttgcaagaatcacaaatctgacctcctaaagctgaagtacagagtagaattgggggagcattctaaggcttgctgtaaaattaatcaccacacaataataattttaaaaagccgttgccagagggagaaaggcataaagtcactgaggtcacagtatcaagctatcattttgatgtacagttcccaaagagatcagtctactctgacttagaacacattatttttgataaaattgcaacctgtcagggatagcaaagaacccggattcttcagattaaaaacctaggatgcagatggacagcctagggtactctgagaagtatgttgtgtgtggtgggcggagggggcatatgaggactgtccttgctggagtggaatggaataccgaccaatctcttgttcgtctgttcaatatttaattctgcacaaagtatatgattggccaagccttggatcatatcatttacagccataccggactacaatcagtaaataaatagcttgctgaaaatcaataaataaggaaataattgtcttctataggattcaaaatgaagaaagaccatcatttttgttatagttctcagcccaattcactcttacacaagggacaggaagtaggtctgagtctatctccagcaataggctgaattccaaagggtgttggtcccagggtctgtcctggtttgaaatgagttcaaggtagggtttgagcaccttgacacagtacagactccctccaagtcagggtcagccattggcattctatgctgagacagcctttgcagtgctaccttggataattcattcttacccacttgatcattagagatcaagtcatgaggtatttgcaagtcacttaatcggccagaaagccttcggattaagatggcaatcaggcttctcccatcaatgtctttttgcaaagaatagtccagcctgcctctgcacatcagtctgtattagtctaaggatcattctaagatgtatgtatttcattgtcggtacttctgatccgatggacaatttgtctaagtgagttctgcagacatagaagttctgcagacatagaagctggtggcgttgagctcggctgtgccagctgggtggggaaggtctcactttggcatggtggataacagggctcattctggaaggtggtaacttcttcctttcattcctcttcaatgtgacgtcacagacaatgtcctggtttagggatcaggatgatgtgagtttgtgtcttggctttgaagcatactcgctttggtacttacctcagttccttcatctgtaaaatggtgatacctctcccaattgttgtaaggatcaagtaacttagcacaatgctaggcatatagtaggtactcagtcgtagttagtttctttctccttcctggggttagagggggggtatcactgattgaaccaagaaacatacctagagataaggttttaaggcaggaggaggcttcctgtggaggaagaaaggatgaaaacgtgaaatctcttaatcctcagctaggatagttcactacaacttgaaatctgggcaacccaattctctctgagtttccatcaagggagcagagccagcgtcacacctttaacttctatgacagccaacacacaccattacactttaacttgtgtccaaaaggaaaaaaggccttgccccgagggaggaattagggagatccctatgagcaaggtgacctacacaatgacagcccagggacatcaaaaatccagcagggttgcgaactggggagttgggacacagaacaaatgtcttgataactgcaatctacttcttataaatatcacaataatcgcatttgttcaactactcaatcaatgaggttagctatataagtgtcatatgttgcctcccctggaagtgaatctaggagatttaatgattcattcactcaacaaatatttattgagcatcctctgtatgccaggcgatgtaccaggaactaggggcattaggttcctgctttcatgaagcagagagactaaacaaacaatatcagatagtgctaagttccatggagaaaataaacagagttacggattgtgcccagggtaagggaagagttcattttaatagtggcctggaaaggccactgggatggttactttaagaggggatatgaagagtacaaaggaggcaagcatgaaaaaaatctggagaaaaatattccaggcagatgggatagcaagtgcaaagttcctttggtttgtttgaagaatggaaagaacctcaggatacatggacgcctagaacagagtgagcaagggggcaaatgctgagttgaggctggagagatgggagctatagtttgtatcatggccaaatatttggattttaattaattaaaatagagactctttggtagtttggtttctttttctttttttttttgttgctgttgttgttgttgttgttgttgttgttgagacaaggtctggctctgtcacccaggacggagtgcagtgcagtggcatgatctctgcttactgcaacctctgcctcctgggctcaagtgatcctcccacctcagctttccgaatagctgggactacaggcacaagccaccatgcccgactaatttctgtagtttttgtagagatggggttttaccatgttgcccaggctgctctcaaactcctgagctcaagcaatccacccactttggcctcccaaagtactgggattacaggtgtcagccaccgtgcccagcatatgttatataatactaatatataatctctttggtaggttttaagcaggggaaggtacattcaggggagagaacctggggcctttagcctgtccatgccctcaattctgtaagctcccctgttctgctcccagactcagcatgcctctaggtgtacatgattgttagactgccctcctgtcctcccccttagctaggtgggccaggccagagctcctaagctctgacctttagccctcaactccatctgtccttctggcctcaggctttggctttcacaatcctatgcatcattcagacctaggttttagtacctccaactttcccactcgcttttctatttttattctgagctcaggtcactgttctctccctacttcctgaactttgcctgtgcctggactccttaaatcatagagaaactgaggcaggataggtagtcaagaaagtgaccatgttcttgggacccagcaaccacggtgaccatacagtcaacacaataagcctcagcattagcattgtaattggactttctcctgaagagagcatgcacgttttgattttacctgtcctcaaactgatgctttgctcgttatcatgtaaaaaacacaaccctgggtggagattcaagatgctaatgagatattggtataggaacaagcatgtatagctactgcacgtgtgcactcagagagccatccagaatatgcttacctgtaggcacctctttccacctccttatgaataatcatgcatgactcctgtaaagggagtctccctagtgccagtctttgctgtctcatccttgccagtagcccaccctgaattctgtctctctcaaggtgtactgtctagtctgcacctaacttataaaatatattttttcttttgcaataaattactctatgtcgcacttcttttgctgtgtgtctcttatttaaattcttttaaactaacaggataagaaccaaggtatcacaacagctgtcaacaaaacaaggggcagaagttcatggaccaaagactaggatcaggagtcacattctgcctctgctgccttggggatcattacttcacccctgtggtcctctctggagcttctaaactgtactgtgttgggattggatgtaatggtcattaaggtccttttcaacttggatgctctaacctggggttcagccaattcaagaaaaataggaaaaaactaacaggtacgaagtagatatactatatatttgagagaaaatgactccctatattgggtttaaaagcactctttggttttgaaaccccacaaaacctctctccagcccctgagctcttggcttcctgtaggcgtatgtttgtaacacacatatgtcttccagggaacaacatgaatgtcagtgtcatttaactggagacttgcctggtgtttgtatttgaaatgaaagtcttggaactagttagcctcaaatgtagattagccaaagcatgaaatttttcttcctgcctcttttttctcacaaattagcattttacatgagtaatgtatgttcattattcaagaacactatggagttagataatatagaattgaaagtctcccagaattttctattgattaccacagtaaaaaattggtacatattctttcctttaattaatcaactaactaatttatcgtatgtaaatgtactaaacatttttttaaatgtttgtggttggcttagcagtagcccccaaagatatatccacatctcaatctcaaggtaagaatgttaccttatttggaaaaagaatctttgcatatgtgacaaaattaagaattttaagttgaagagatgattctgaattattcaggtgggccctaaatgtaatcacacatatcattataagaggaaggcagacagagattttaacagagagaaggccatacgatgatggagtggagagaaatttgaagatgctggccttgaagattagaatgatgtggtcacaagcccaggaatgccagcagctaccagaggctggaaaaggcaagaaatgggttctcccttagaacctctatggggagaacagccctgccaacaccttggttttggctcattgaaatctatttctgactgacttccagaactgtagaataaatttctgttgttttaagccacgaagtctgtggtaattggtcatagcagccacagaaaactggtacgatgttcaaggcctaaaatggaaaactgcagtccacttcactcattttcaagcccctagttttgtttcccagaggcaaatattttaaatcttggagcagttacttctggaaattttcttgatatttcctgttgaagtgcatgtatacgttatatgtgtgcccactgactttgtatttttgttttaaaaatgtttagaaactcttatacctcctaaacatatacatatatatgcacatgtatgcatatatacacccttctcttcatcacactctcaacttccaagataattataatacaacttttggttgaatctgtagtcatatgtgtgtgtgtgtgtatgactatacatatatgattcatatatatatatatatatatatatatgtatatttttgagacaggatctggctctgtcgcttaggctggagtacagtggcacattctcagctcacattcttcacctcccaggctcaagccatcctcccacctcagcctccccagtagctgggactgcaggtatgtgccaccatgaatggctaattttttttttttaattttgtagagacaaggtttcacgacgttttccaggctggtctcaaattcctgagctcaagcaatccacccaccttcacctcccaaagtgctgggattacaagtatcagccaccgtgcccagcctgtagtcatatttttgtgtcatttattacaatgatataaattgtaccatagcagttctgtgtggtgtactatgtttatattttctttcttgaacaaccttttgttttttctggagttagtaattgcctcaagtttttctttgcccactccctttatgtgcatatcaccataattccatcctcaaactctctgccagaaatagaaaatctctctcaatatattcaagcacatgaaataatctgtgattttcattctgcccccacctgggaaacatctttcctagatctcctcatcttcttggttcaataagaagtggttgctttttagtatttgtaactgtgctgtcattctgaaatcctaactgttggagtgtcagctttgcatatcttctgtctctctttcttcgttgtgcctcattaaaatgaagattcaaaattcaagtagcttctgaagaaagggtgaatgctgtgaaaattctttgatttattgcatatctttatcttgactatgcatagaaatctaggaaactgattttacctcagagttttgaagacattttcttactgtctcctagcttctgatagtgctattgataattttaatgcttttgttatttctgatctcatgtatgtgatcttcctctgagagtttttgggattttaattttaccccattactctgatattttataatattttattcattgtgctgggcataaagtaagcttttaaaatctgaaaacctataacctttaattatggcaaattttctcattctagctcttgtataattttctcaattctaatttcttcatttcctggaactttcctcagttacattttgaaccttctgactaattttttaacacacttatcttttccttactcttttccattactttgtctttttattctactatctagatttcttttcaaatacatatacagataaatttgtccattctatcaaactttgtattttggctttcataattttaatctctaggagaaattttatttgttatttttgaagctccttttaaaaatcatgtaattcttgtttcatggattcgatattttttacctctgtgagaatgtaaattggagagtttccccgcatagttttcccttctctgagttctgcatcgtatttattttctctaggctcctttactctgtttatctgcctttcagttagaggtgttactcaactgttttaatatctggtatcttttcgcatttaaaagtgaagcattgcagagataagcagcttcatgggcatgcacctgacttccattaggatgctcctgcaggcatggagccatttttttaaaggacgatcaactgacactatctgtaagactcttctctctgttgggtcagcttgactaccctccaatcttctgtaaagggctagaggacttctattcctaattcccagttttcagcacagtaatctgcacctcccactctgcccaagctgtgcagggtattcttgagttataagttcctctgggtcaacttcttcagagagcaaacctccagtctcctgctagataggggagggagagctgtctggttgcctaaggtaaagaagggaatgtgggggtctaattatttcttttatggagtttcaaccaattctttacttttaagctccatccacaccttaatttttgaagacatctattgccttaaattctaaagtgtttacagagttccagaatggaaattggttggcttcttgttttacccacccagcaaccttatgggcattttattttggctttctttgctatgcaaagttaaattttagttatccatctgtcttctaacatccaaagttatcttgatatttctctgttttttttccttcttgatcttcgtcttcataagcgcatgcttttaacaaaatctttttacattcattttagtgggatcttggagcagaacaggataaaacacctaagttctattgaccacattttacaagagcctgtctccttctttcttctcttccagctctgaagccaagatctcctcctctgaatttgtggctgcaaaacttctttccaagtgcaggtatgtggctactacctctgttctctatgggatgaggtttctctgctccatgtccagtagggaaaagaggagcctcatccagccccagcgtaccccactccaacgtcaccactctgcaccaaccatctcctcccctttcctctcccaaatcacaatctccttggctatcttggtcatagagactcctctcctccttctcttcaagatctcaatgatcctttacccaactctgactcccttcctcgcacaagcaggagccctgtttcaaaaatttctggttggacttattgccaatcacaccttaattttaatgtctgatgttttatttttggcttgctgccttgagcctcagtcagttttctaaaatgaggaaaagaaggtataattaccaactattctgggtcaagatatatcctgccatcaacagaacctttaagccgtctgcctgttttttgaacaacacattcaatactctgtaaaaggtaaaccctacatctttctgggtctccatggaatccatcctgaacttgccttaagtcataactctgtaacgccgtaatctttccagcatctatttcaactgcctgtttccctcatttccagtttttcctcatagtcttcttgaaattaaagacaaagtgttatatgcctcctgcagtgggctcaataatgccctcctcccacagaagatatccatgtctgaatccccagaaactgtgaatgttaccttatatggcagaaggaacttttcagatgtgttaaaaatctttagatggagagataatctcggattattcattcagatgaacctaatgtactcacaggtggcctttctaagaagaggtcagagagttggctcatgctctttctgccacatgagattacagtgaaagtcagcagactgcaacccagaacagggccctcactcatgtggcactgtgatctcaggcttccagcctccagactgagaagtaaatttctgttgtgtagaaggtaccaatctatggtaccttgttgcagcagctagaactgactaggacagttgtgttcatgtcttgattcctggcccaaacaatttcttaaaataaaagatgatcagttaagggatttaatttgcagtagcttttgcattgggggaaatggataatataatgggtataaagaacccttaatatgcagagagacagaacaagttcaagccacttactttgtgcttttaaacaaaccacttaacatttttaagcacctattcctttatctgtaccatgttgattctctatttggacatttccagtgacatggatgctcaagtctttatgggcaacccttattatcacggcagtatttatacccccttctttctttttgcattgaccttgttatctttgttccacttccctaacatctgtctccacacatgccatgaattaattatctctgcctccaagctccataggttgatggagcagaaaggagatgagatttctcctcatgggtctgcatggatcctgagatctgatgtctgcaccaatgtccatccctctctaaccacattatgtcactgccaacggcaagccatgtggcaagagagacacaactgcctagtctgtttccctagaaagcacaattcccaccacaggtaaagaagctccatttatccattcatccatctagtcactcttttattcaacaaatagttactgaccatctattatgcgtcaagcagtcagttagatcccacacacacaaagaaaaataagacaaaagccaatctttgaagtgccgcagggagctgactggataatggaggaaacaggtccggaaatccacaaccactctgtaggagctatgatcaacagaagtgtgcctaggttgtggcacctgtggacgtgggtcaggtctgcaatctggtgaggtcatgggaggcttcccagaggagataatgccagagttttcaagaatgagaagaaataaggctcataaatttacttttactttgtttctggactttctgattcttttaatagggaatggtaaaatacgattggtgaagaggcccttaaagattatataaactaatcatctgattttacaaatatgaaaactgagggagaagaaaggttgtggtgtatccaagcatattggtagggaagcttgaggaaatcgtactagagcagtttgggtccttgtggcaggagttatcatgttataaggctttttcccgggtcactgaatttacctagaggttagttgaagcctgcaggccctgggttataaataagatgacgctattttgttaaaaagcagtagtttgagtgggggcacagtgctggctttttatttttaattttaatttttttgagacagggtcttgctctgttatccaggctgtctgtcatacagggacatgatcatggctcactgcagcctccaactcctggtctcaagcgatcctcccacctcagcctcccaaagtgctgagattacaggtgtgagccaacacagtacagtgctggtttgaacccttagagtggcgttgtgtttgggtaacacaatttgaaggtgcagcggggcacctgtgcctctgctgcactgcagcccagcctggagcccattctttcttcaggaacacctggcaaagcaaggtgttccaacccgtgttggtctgtgatgtgctgttcaacctgctgaaatgtcccttttctctcccagtactcatcatggatacgtgagcttctcctgaactccctctcccaccaatcttgatgcatttgccacagttatacccacctgggtgagagtcaaggagcctcatcctcctccatatgcggtcaaagggtggcggggctgggagcaatgaatctcatttttgttttccctgggtctggtcagtctgtgcttgtattactctgttctcacactgctataaagaaccacctgaaactgagtaatttataaagaaaagaggtttaattgactcacagttctacatggctcagggggcctcaggaaatttacaatcgtggcggaaggtgaagggaaagcaagcacgtcttatcacggaaaagctgaagagagagagagtgaagggggaaatgccacttttaaaccatcagatcttatgagaactcactcactgtcaagagaacagcaagggggaaatctgcccccaaaatccaatcacctcccaccaggccccttccctgataggctggaattacaattcaacatgagatttgggtggggacacaaaatcaaatcatatcagtcctctttgtgtgagaaccttctgtaagtttcatcttcagaaccaggaaattagtctctgacttttctaaaaccccaaggtccctggggtgataaatgacagctaatttcataaatgaggcctcctgactcaatccaatcatcatcccccttttctccatacctcccatgatgtaacagtagatggagaaaggaattcccaagagtgaatataggaaaacctttggagaagttactgagtctaaaacagtctgtaaggagctaatccctgtcttctttcaggggagtttcactgaaccacttgacctccagggatgactgcctacagtctcagtttggagcagctgccttctgtgcaggcaatgggaatgggcacataatgtagaggcttgatgtttgcaagacgctgtagcttttctaagtcactgttctggccccacagcacacaacacacactgagccacaagagggctccagcacaggctccctgtaatctttgttcccaagcatctgctttgacctactgtttgcatctgttagttatttattgctgcataacaatttgccccccaaaacttgatggcttaaagcaaaggatgtactatttcacagtttctgtgggtaaagaattcgggcctgatttagcaggtcttctgcctctggggtctcccatgttgcaaccaaggtgatggctggaactgtagtcatctcaaggctcaactgcatgtgagggtggagctttgcttccaagcttactcatatggctttttttttttttttttttttttttttgagacggagtcttgctctgtcgcccaggctggagtgcagtggcgggatctcggctcactgcaagctccgcctcccgggttcacgccattctcctgcctcagcctcccaagtagctgggactacaggcgcccgccactacgcccggctaattttttgtatttttagtagagacggggtttcaccgttttagccgggatggtctcgatctcctgacctcgtgatccgcccgcctcggcctcccaaagtgctgggattacaggcgtgagccaccgcgcccggccctcatatggcttttggcaggattcagatccttgtctgaagaccttcttcagttccttgccatagtatgatataatgctatcagctatcagagcaagtgaagggcaagaaagagccagccagatggaattcggtttttatgacctgatcttggaaatgacacactgtcatgcttgcgctatttattaggaacaggtcactaggaccagcccacataagaggagaggagattacataagttgtgaataccaggaggctggtttctgggggccatcttggaaggctgctgtattaatttcctagggtttgccatatgacaaactgggtggcttaaaacaacagaaatgtattctctcacagttctggaggctaaaagtccaaaactgaagtttcaacaggatcaccctctttctgaaggctagaggggagggtccttctttgcctcttcctaacatctggtggttgcagcaatctttggtaatctgtgcagctgcacaagttcaatctcttctccatcatcatgtggtattctctctgtacgtctccgtcctcacatggtattctcctctttgtgagtgtgtgtctctttgtccaaatgtccctctccttgtaaggacaccaatcatattgaattcaggacccactctaattcagtatgattttatcttaacttgattacatctgcagaccccatttctaaatagtcacattcacagtttccaggtagacgtgaatttgagggcaatgctattcaacgcagtatagctgcagactggtgccccttggcaaatcagtgcaggtttaggatcatcctaacccaatgctgatccagggatttttaatagcaaagtagttaatgcatttgtctcctgtaatcccctgggatctggacaatatttctgttgataacaaggctttgagggatttagcagctaaggcaaagacatcaaagcaaactagttatgtctttttgatcttaaagtcaattattttcagtcccctttctctttcaatacacctgaacctgtgacacatttccttacaagattgtgtctcactaaagtagagcttctcaagtggggggtgggcatggcttcttggtggggagaagtggctggtatcaaagtaaataaaaatttctggatgggtgcatgttgtttgaatataactcttacattgactgcttcaccccactccccatgaggtgatatttggtaatatgtaaaacaatttaaaatgaacaccctcactaaaccatcaattcacagcaatttcacccgtacatatacagtacacttaaggtactcaatcagtcctagagaaacttacataaaagcatgcaatgaagcatgtaaaagaacgttcattgcaacattcattgtgtgtaatgacaaaatttggaagcaacacaaatatccttcagtagtggaatggctaactaaatggtggtatgttcctaaaatggaatattatacagcaattaaacagactagatctctatgaatgcataaaaatagatcttgaaaaccatgctgagtgaaaaaaagcaaattgcaaaacactacatactgaatggtgccatttgtgttaaataaaaacacaccaaacaatactatattatgtttatggacatgtatatgtggcagtaaaagtttaaaaaccatgaacaggaaggaaatcacccaagttcatggatctcgattgcctttaggctttggagggagaacaatgagactgaaggggagaacaaggaggatttcgactttgcctgtttctcttactcatatctttttagaaacctaaaacaaaacaaccaaatgttgttgtttcactggtatttgttatattacgtgattctgtgacctttttttttttttttttttgatttttgagacagggtctcactctgtagctcaggttggagagcagtggcacaatcatagttcactgctgtagccttgaatttctggcctccagcaatcctcccacctcagcctcctgagcagctgggactacaggctcatgccaccatgccaggctaatttattattattattattattattattattttgagtcagggttctctctctgtcactttgtctgaagtgcagtggcaggatcacagctcactacaacctcaaagtcctcggctcaagtgatcctcttgcctcagcctcctgagtaaccaggactataggaagatgctgctgcacttgactaattttaaattttttttaatagagacagggtctcactgcgttgcccaggctggtctccaacttctggcctcaagcgatcctcgcacctcagcctcacaaaatgctaggattacaagcatcagccactgtgcatagcccatttttaaacttttaaaaataagaaagtagaatggaaataaggccctgatttgtaatgactaaattcccatgggaacgtggcttgctggagttgtaaatcaccacttgtgtgcccatgggcaggattaggatgccctggccgctgagacaagcacaaagaggatggacagagctgtgtggagcaaagcacacatcctagttttaattgagttgtagaatcccccagatattcattgttagaccactcactaaatttctactgtggcattgtaatggcagaacatccttagatctggagcaagagggaaggagtggcctgaattcctgatatctttctcattctggtttacatgaaggctgtccgaatctcagtcactgtttttggatttctgtgagatgtcactatccccttccaatggcatcttttccatctctttcagcaatcagttctaggggataacatctccctgtagtcaaaatggccatgtccaaaataagatcatgtccctagaggtcagtgtcaggagaagagccaaaccacattgataaaattgtagagacgtcatgtagatacagagagaaagtggcgtggagggcctagaattcaacatgctccacctgaactcacaaactcctctaatcacaccgccaacagcttgatcgcttaatccagaaatcccagaatcatgattaacatctcctcctccattgccacatagagttaatcaattgatcactaaatgctacccaatctcccttctcaacacctatcaaagccacccatttgtcttcatctctcttgctctcctcacagtccaggaatccaagcctagacaacttatttagcctgcaggaacagccttctaactggttcatcctgacaccccactgttttcaatgtcatctccataatagccagagtgatctttcacaaacaaatctgatcatgtccctccattccttaaaaccttcaatgatttctttggatcttacggataaagactcaaatcttcagtggcttatgatgtcctccctgatgatccttgactacctcttcacctctatcactgtgttccattcacactgtaactgatacacctctttggaagggcctgcaatggagaggacatcttgctaagcacttgatcctgcactctgaggctaggcactgagagttgggctcaaagtgggagctatttccaaactcaggctttaattacttatcgttggacttgaaatggacttactgtcatcaactctccgtctttgccacccttcaagatccagctcaaatgccatctcctaaagaggcctcccatgactgcatctcctgccctcgacacacacactcagaattgttctctatatgtctgtttgaatatcattttatagattcttctcctcatgccatctgtctgtcatgactgcatctcctgccctcaacacacactcagaatgattatctatatgtctgtgtttgaatatcattgtatggattcttctcctcaagctatctgtctatctttccttctgcaactatgagggcaggaatgatgcctcgctctgactctctaacctaacaaggcacttcaatatagcatgtgctcaataaagatgaatggagtttaatagcattgatgggctggaaatagatgcagtgtgtgaaggaatgaaggcttattaaagatgctgggctctccaactttctaaagaagatctgtggctcacctttaaattcctctaaacttaacaacctctgccagctatttccctggaatcatttggacagacgcactactaatgatgatttaaagtgagactttgatgtcagcacctcattcacacttcaaaaaatatgtattcagaggcacacaaaaagggtgtaattaccatttcaggaaaatatgttaatttgatgcaatgcattactgctctgacagctttcagcttttgcacaaaatggttgtaaaatggatattactggaaaaaaatagttttcttcccgctcaaaatataggtagagagcaaaggcaaatagagtgagggccctctgtggagttgggcaaggggaacaaactgttagcacatggtctgactattagctggcaagggtgcaggtgctgataacatttctggtgtggaggtgcctgtctgggcctcctcactcaccaagagtgtcaaaaatcctatttaaagtgggagcgatgggaggtcataatgctggctctactctggaaagacccaactgtccggtccaggctggagctggggttctctgtttggattcctggggctgccatgacgcctggcttcctctgacagagagctccctttatggacgcatgagatgttgcttccaacccctgctaagagagaagagccaccccctgcccaagccccagtgagctgcccaacagtcctctctgagctgagagggcattggatctccctgtaactcaggggcctcctctctaggatgtgggtaatttctcctacctcgaagggatggcgtgagagttaaatgagggcaatggatataaaagctgagcttagtacagatacttaataaatggtagatcttcttacagttattattacattatcattttattatcgtagggagtaagctgattaaaaataattatcaaaaggagtgttgaagtgacccagaccttaagaaacccagagtgtgaagctgtttctaccatttcagaaggggtttctacagctgtccctcagcatgtaccagggattgtttccaggacacccctctccctgtgccaaaatctgcgaatgctcaagtcccttatataaaatggtataggattcgcacataacctacacacatgctcctgtatgctttaaatcatctctagtttacttagccctaatacaatgtaaatgctatgtaaatggttgttagactgtaatttaagcattttttattgttgtattttttccgaatatttctgatccaaggttagttgaatcgacaggtatattaagatgagctagttgaacccgtggatacagaggctgactggatttacagaaagggtgttttacatatgcacctgtctaggccaataggtggagagtggaaggggccagagagaactcaagagaggcgatggctctccctcatctgccaggtgtctcggtgatctgaaagtgtgagaagatgcccttgtagtaggtcctgcctcccacaccccaacaatttcaggatgtgtgcaaattcctgctccactcccacatggtgcagagatggaggacaggggtgacttagattaaatcaactagaaatgtccttgcgagcagacacctgtttttgctcccaccttcctaacatgcctccgcagagagaaggggcaaagaaagccttgggactcctgttctatccccaaagaggtgggaggtgggggaggaggaaacagtgggagaacactggtgtctgctaggcaaatgcgacactcagggctcagttcccctctcttttcctgccttgtggaagcatatactggggaagtcagctagcagcttgcaggtggtaagaggggtcagtgacagccagaagcagggatgcccaggcatgctaccagcagcccatagcttccattacaaagatctgggtcatcaaccaaaacctggaggaagacccttgtcaggcactggtccaaggccaagcttgctcagggtcacccaggacagagcccttgttgttcagcagtgcaaagccttgactccctggctgcccgggggataggctgagtccaccaatgggaacctgctacacagggtgggaggagcccttaattttcacacagtattgccaccagagaggaaatcagacccttgtctgggtgggagggaacaaggcaggatgatggattggccctcatgccttcagttcgcatctgaaatattagggtcaagggacttgcgcatggaggagagcataggaaataaaccagagagggcttggtgaccaggagtgcaagggagagcctggtgagccaggacccaggagactcaggagggacctgattcagcgctgccctgcaggtgtcctgtgcaacctgctccatacccttgatctcctacccagctgcatggctgctgctagcgcacagagctactgcctgaagattagaaggagtgcaccttctcaaggtgcctactttgcatctgtcaggaacttgtcttaatatactcactttgttggaataagatgttttgctgccatctgctagaaacattgtcataatagatacacacaagtaagatgtcagcaacgtgagaggtggccttgtacagcgcaaacatcacagttgggcatggagccttcagtaccctttgaagttggatttagctagaggctgcaataaggcactgagtcttgccttgagttgggtgtgaggcaagaagattggcttctcaaatgagctggcggtttgtgcagggctggggagcttcagtgctattgcccttcctatcccaaattccaaacttatcccttcaaaggagtttggccgcacagcgagaatgaatgtgtgtcatccaggcaggccaagggaaacttttaaatttttttagaaacaagagtgtcactctgtcacccaggctggagtgtagtggtgcaatctcggctcactgaagcttcaaaacttctgggctcaagtgatactcttgcctcagcccctgagtatcggggaatacaggtgtgcacttcatgcctggttagttttttaaaaaatatttagtagagatgaagtcttattatcttgccaaggtctcaaactcctggcctcaagggatcctccaagctcagcctcccaaagcattagaattataggtgtgagccaccaagcctgccaagggagacttttagaaagagaaggcttgcccagcctggtttgtattgttaatgttatttaaagaatctaaagaaagtaagtgggatctccagaagcagaattaagaaggcaggaggctttgagttttctttgatgcctataaacatggttacaaagcaacaatcaatttctttctccctacagtttccaaatactttaatattcaccatatcattttattcacagactacttctctgtaaaaggcagagtgggtatgatccttattttgcaaaggaagaaattgcaaggcaacgttttaagtgacttaaggcatgtactgactcagagattcatgaacatatgtcttgatttactatataaagggttcagttctagtaacttgaggaatggggcataccacaagtactcaagagtagcctactgaatgaaaaaataaagaaacataaatgaatggacagagttgttaggtgatagcattgttgaggtaactagactggccaggttgacctcatttgggataacttaggtgttactgcggttcaataaacatccaacacagaccaacacagaaataatgcttgtgactccagctataatctaagaggaaaggtaagagatgggagatcacggagtaatgcacttgcttggatcgttgtctgtaattcatcatactgcagaaagggaaggtgttttagagtccatcaaagtctgatccagtcagcctttggtgaggccttggactaattatttcatccctctggatcttagttgacccaactgtgaaatggagcaaatactgtctgttttagcaatccatataaaactctaagtgcattgtcctggaaaataacaaaaatgaagcaatgaaaacattcattgctattcctctactccttagaacatagttaaaggcattattcagcccagccatttctcagtggaagacaatggtggtcccctggtgttgtgtggaactcaagaaatgagaagagcaaataacttgttgcacagtctctgcacaacctgaccccatctcttggtctctgtttcctgaattcattcattcattcattcaggaatttggggattcattcattcatgctttcattcattgcgctcaccaggatttcaattctcctctctttccaagcatgcaccatttgaaggcatgaccatctgccttgccttgaacaatgaaatatgatcagagatgatgtgtgtgacttctgagtgagataattcaacagtcactgctctgttctccatgttctcttcccctgcctaagcaaacccccaggtctgtgcttgagaaggtggcctcataaaatgatggctcctctgccaacctgggtccctgagtaattacaatgaacagaactccccttccagcccacattagacaaagagcaggaccgagaaataaacctttaacattttaaacactgatcctcctgtctcagcctcctgagtatctggattacaggcatgtgccactgggcccaggagaggaaatctattttggatgcaatggttagagaagaccctttgagaagatgctatttgaatagaggcctggatgaagtaagagggtaagccatccagatatctgggttaggaacattccagagagaggaaagagtgaacacaaagtgctaaggtcagctcatgcttggcatgtggcaggagctgcaagaaggccagtgtggctgggtcaaagtgagtgacaaggcgagagatgaaggcacatcaaaagacatggctgagaaagtgaagaagcaaaccacagcaccagaaggaaacatttatcatcatatctaacaaagaactcatattcagaatatagaaagaactacacatcagtaagtgatatggtttggctctgtgtcccgacccaaatctcacctcgcattgtaataatccacatgtgtctgtgaaaggacccagtgggaggtaattgaatcatgggggtgggattttcccatgctgttctcatggtagtgaataagtgtcacgagatctcatgcttttaaaaaggggagttcctctacacaagctctcttggctgccaccatgtaagatgtgacttggctcctcatttgctttctgccatgattgtgaggcctccccagccatatggaactgtgagtcaattaaacctctttcctttataaattacccagtctcaggtatgtccttattagcagcgtgagaatagactaatacaataagaaaaagacaaacaacttaaagtttaaaaatgggcaaaagatttccgcaagtaatttatagaaaaagatatccaggctgggtgtggtgtggcccatgcctatagtcccagtattttgggaggtcaaggtgggaggactgcttgaagccaggagttagagacctgagcaacatagtaagagcctctctctacaaaaaaggaaaaaaaaaaaaaattagccaggcctggtggcacatacatagatacttgggaggctgacacaggaggatcctctaagcccaggagttcaaggctgcagtgagctatgattgtgccattgcactgcagccggggtaacagggtgagaccctgtctctaataaaacaacaatggcaacaaaaaaaagatatccaaagcaccaataagccaatgaaaaagaagtgttcaatcttactactcctcaggaaagtaaaattttgaaccaaaatgtgataccactataaactccaagaatggttaaaaaggctgaaaaatagcaaatattcacaagaacatgaagccaatgaaactttcatcttttgccaggaggtgagtaaaaccacactggaaaactggcaattctaacaaaggtaaaaatctgccaattttattaagcagaaattccattcctaaggatacacccaggaggaatggggagaaaaatgcacatagcccaaagctgaatactgaatacaagacaaatggccatcaacagaaaaatacataaatcgattgtggtctagtcatacaataaaataaaatacctcacagcaatagaaaagaacaaagtattgatataagaaggtgaagctcaaaaactatattgaatgaaagaatccaaacacatggatgatttcattccaaacactctatgattccatttatttactttttaaaatattatattatattttattttttgatacagagtcttgctctgtcacccaggctggagtatagctgtgtgatctctgctcactgcaacctcctcttcccaggttcaagagattcttatgcctcagcctccccagaagctgggattacaggtgtatgccaccatgtctggctaatttttgcatttctattagagatatggtttcaccctgttggccaggcttgtctcgaactcctggcctcaagtgattttcctgcctcggcatcccaaagtgctgggattacaggcatatgccactgcacccagccctatgattccatttaaattaaggttaaaaacaggcagaatgaatccacagagattaaagtcagagtaatggtgacctcaggtggaggtaggcattatctgggaagggacataagagagctttgtggatgatggacgtattctgttctttgttctggatggtggttctctgaatgcttaccaagatgcaaccctatcaagcagtacacttaagattcatgcattttaatgtgtgtaaattgtacctcagttgaaaagaacaacaaaaataaagaattttcctggcagaggagcttgaaatcatgcaggactttacaggaatagtcagtgatgtggtttggctgtgttcccacccaaattgcatcttgaattgtagctcccacaattcccatgtgtcatgggagggactcagtgggagataattgaatcatgggggtgggtctttcccgtgctgttctcatgatagtgaataagtctcacgagatctgatggttttataaagaggaaatccctttcactcggttctcattctctctcttgccggctgccatataagacatgactttcattttccaccatgattacgaggcctccccagccacgaggaactgtgaatccattaaacctctttttctttatgaatcacccagccttgggtatgtctttatcagcagcatcaaaacagactaatagagtcaggattttagatttctttctaaaaaagatgagaagcccataagcaggctcagaatcattggaaagttctgagccgacttacgtctggaaagaatgattttgtctgctgcgtgaagagtagacattggtgagatccaagtagatcgggtaaagggtgtaagtggaagacctgggagagctgaaggtgactgagtccagatgtgaaggagcggaggagggatgctgtgtaaatgctggaagtggagaagatgggatgccaggacaattgggaatgaggagcctaagggaggggctttggcctgtgcacttggcagaatgcagcagccaattactgggatgggaaagaccaaaggagcagcagtttgggaagtagtggggagaaatcaagaatttggttttgaacaggtaagtttgatgcccattaaacacccaatgaaatgttcaagaggtggttgactaattgagtttgtattaataaatagcatgcatcaataccctcaacccccaacacatacacacacacacacacatacacactcacacattggctccttcccgttcatttttttcttaaaaaagggaaaaacaaatctgaaaaatgcctttcatctattttgcagtaagggccctcgctagaagttactgaactgaacatgcagctgctggtctggaagccacagccgagatctgaaaggcaggttggcagcttgcacttgtcgggacgccccttctggatcctcgctctgccctctgtcacgggctcagcacacgtggggcatccccctgtggtgccctctgcttcagcagctctcaaggcagctctgctccccacagcctctcactgggggacccagcggggcctgcaggtggatgactgtcaggacaagtagcctctgtgtcctgtgttgaataaacacatcattagagagctggggaaaatacgtggagggaagggaaaatgtcattttggtaaagggctcagcttaaaggaagaaaagccataatgacaacattaaatatttaggtctcaggcctatcaggaggttttctgtagggcagggacttagtccgagttgtccactcacggggaggcaggcagggcagcctgcagtgatgggcgttagggtcagaagggcctgattgtccgtcccagctctattacttggttaagtatggtctttcagaagttaattccagcttgtaagactcagtgcctgcattttaaaatagacttaggaataagttagaagaggtcaagatcacgtgaaatacaatggcaccttccatgatccgtgggctattgcaaacacttataggatcctacattcttctctcttcttaccccatcccaagtttcctcagcatatggatgcaattgcatcgcattactattaagaaaccccccccccctttttttatgcttttgctgttagtttcttaactcagaaccctggcgacctcgccccactctgagaattccgagggattccaaagtgggtctcttgtggctcacaaaccgctgtagcacaaccttctgcactgaccccacagagccacacgagggcagcacatcaccagtgttgccgcttcctggtccaggagccgactctggaataccccagggtgcattcttatggggttcccaattggaccacctgtgtgatgccaggagactgtgtggcatgcaaagatggcctccactgagctgcatctctcaagactctcacctttccacatggaaggcagactggccctggacagaaggtagagtttgcaccatttcacggctttccatttgaattttgtgctctttgggaccctaggctaccatgtcagaaaactgccaaagcttctggagagatcacgtgaaaaagcctcgaaacttagagaggaagagaaagagatagacacccaggggtcctagcatcccagttgagcctctaggtgtctccagccccagttgccatctgaccacacctgtatgagagattggagcaaaaccagcagaagaactgccccgctgaacccagtcagctcatagaaccatgagagacgataaaatgatagctgttttaatgcagcaatagagaactgaagcaggtagtttgtgtttccttgcatgttcagcttgaaatgtctctgcagtccatgaaggagtggggagaaagccccatttttacagcaccacaaggcagcctgcacccctccttccctgtctcaggctttgataagtttcatgaagccaggctagggagcagtgacagacacagactctaggctctctgcctttccgcatttcctcaagattcctctcaaaatatctgttccttctccctcagctgaaaaaccctgagacaatttaacactggcagtctggtccacccattccttaggcatcctgggataacctcaagctaggactccctgctttgattaaaagattaaatgagagaaatccaaatgtgaagttatttgttctttgttaaaattatttggaaaggtgtgacctccttctgatctgattatagacacctcagggcagaaagaaggttcagagatacttggtcttgcagccatcctcaaatgtaccaaaaatttttggtagaataagtaaatattacatcttgcttgcctgcctgctaattggaaaattagtataaatattctaaatcataacatgcaaatttatctaaaagaatcactgaatctcctagaaggttttggtcattacacattctttcaaacaatgaataccaaaaccaactacagaggtgagcctgtaatatactttgtactcctaaatggaactctactcaaaaataggggaaactcttgatctagtctaactcttattttattaatgaagaaactatagctaaaaaaagaagaaatggctcacaagaggttggagattttccaggaaagttccaagttgaaatttctcagccttgaagatggcaacacaggatcccatgtctatatgcaggaacttccaagacacaaagtatgcctttaaaatctcagttttacaacaacagctatcagcagaaagaagtataaatggtccgatttttttaaagtgttcaatttgcagggtgatatggcttggatctgtgtccctgcccaaacctcatgtcaaattgtcatccccaatgttggaggtggggcctggtgattggatcatgggggcagatttccccctccttgctgtgatggtgagtgagtgctcacaagaactggttctttaaaagtgtgtagcaccttccccatctctctctcttgttcctgctctggccatggaagatgagcctgcttcccccacaccttctaccatgactgcaagtttcctgaggccttcccagaagccaacggatggccagtatcatgcttcctttactgtctgcagaacgatcagccaaataaacttcttttcttcataaattaccgagtgtcaggtatttttttatagcaatgtaagagtgggctaattgacaggggctttctcacctttggagaaggaaacttcttcaagataaggtacatgtcactgttctgtgggtctttcatcctttgttcatattgtctatccaccaacaaatacttactgagcatcttcttttcttgggcacctttgggtttaaagcctttgccctccaagggcctacaagctagttagggagatggtgggtacaactaaatgcagcaggagatgtgctgtggtagaggcagcacatgctctgcctggattccctcccatccccattgccaattctgcacctcaagtccctcctgcagactttgctcctgctggcccacatctgcgactttcttctgaagactccaagagggctactggagacaccaaaagaagagccgccacacagagacccaagtccctgtaagttcatgtggctccaggggcccaaagccaatggtgggtttggctctagctgggacacgttctacagcataagggacctccagacctcaccacagactcaggctgaggctgagagttcccctaaaattgtaccctgatttggctttcccccctaccctatcctgctcttttaatggtcagcttctgtgatcttgttttaacagggcaaagataaagcacaacttatgggacccctagctctctcttaccaggtaatgtactattttggacaacatcatttcctcccttacagttatttatcggtctgacctttccttagagaccttatcacagaaagaaattggttttctctgggcatacctgtaatttaaactctggattcatagcctgtgatgggttctgtttgacagagtactgggtctatctaactattgagggtctgaggacccaggaaatgtcaccaaagtgaatcaggggaataagttatagctgtagagatgtgaattatgggagggaatgagttgtcagagtagattgagttgggaaggcagaggaagagttatccatgagccgggccaaccagagctgcagcgcctatgcccaacagcatccgtatctacagaggagccagggagggtcatgttgtgggtgcatccaaattgttaatgactgcaaatgtagcactctcaacagcagggtacacatctgcaccctggcactcccagtctttgctgggccccatcacccccgacaacataatcaaattgcacagattcaagttcattggtctcaatccagagaaatggaagaaaaggaaaatcacctgcattagtcaatttttgtgtcactatgaagaaatacctgaggttgggtaatctataaagaaagaagtttaattggcttatggctctgcagagtgtacaggaagtgtggtgccagcgtctgcttctagggaggtctctcaggaagcttgcaatcctggcagaaggagaagggggagcagatgcatcccttttgaaagagggagcaagagagagagcaggaaggtgccacacttttttaaacaaccagatcttgtggaaactcagagcgagaactcattcattacctctaggatggcaccaagctggtgccttccataaagtactacccccatgatccaaacacctccccaccagaacccacctccaacactggggattacattttgacatgagatctggaggggacaaatacccaaactatatcattaccccgtgttggattgttaggttagtatactcccagtgagattctggagtcttctaagtggttaatgtaaaaggaagtccaaggtaactgttatacccacagagtccagagccagattctagagggctgaatttggggtcactttccaaacaatgtgatctgggcaaattccttaaactgcttttgctttaaattccccatccataaaatgagactaacaaaacaaccctcacagggttgcagtgagaagtcaatgagtttatctgtgtaaagcgcctgggataatgcctggtgttttgggagtgttgacatattaatgatccttaacacctcagtagtattattctagtttcatatgtaagcaaactgagactcaatgaagttaagaagttaaccctaattattcagctggttcttttcaaaaacattgctaaatgcttaccttatacttgctagaaaaaagcaaagctggcatttaaacggagagtccatgatcttcccacacctcactgcctcacgctagcaagatgtctgggatatttcattttaattattttattatattaagggacattcggtgctttcgggtgatctaacaaagtttcaaatacaggttcagcagggaagggctttatgaattcagaagaatgacttttaattagcccctgtatagtttacctgtgaatggataactaaaaaagtgtaaaaaaaaatgctttcctaccttttttggttaaatatttcctttgaaactgagtctcttcttttaatttgcttaatggactcctgcctttgattctgagcacagggagaggtaaatcagaacaggcattgctccagagactacagatctcacattcctgggatgacagtgaggtctcactaatgaggactaattgcgggaggagaagggcgagttactgagaagtcagaacagaaaatcttctgcaccactttgtcattttgaaatcacacaataattcaaacctggctcatacaactcattcatccatttattcattcaacagtccttaggcttcaggaatagatatgagtgatctaaaattaacatattgactacttgaatataaatgaaccattctaaagtgcttgatggggctggaaaaatgagctcttctagatgtttgaaatagttctctcctaagtcttgcttactttgttaaactgttttacaaactctttcttgagacgcttcaaggagaacttcaacttggatttgaactcagttctctgtgtctccaaagttcactattttccccttttctttatctgtgtgtatcttgcacaaagtaggtgtctatgtggttactgttgattgagggacactcagagattaagaaatgtggaccaaatatcaaagctgaaagatatatcccccctgtttcctttcagagacctgaaattgatcctactcttctgtggatggtgtctgttcacagtggtggcaatgagggcaggttcctggatcttgggcatttatcttgtttctacaacactctcctctccctgcacctacactgcacctactccacctcagaatggatgctcggatgccccatggaagtgggctgagggagtgaatgagtgaatggatgagggtatgaataaatgaactcatagcatgagggcacaggcaccctgtttatattctcacacctcaagggaccatctttgatgcttcaggtgtggggaaatgtttagcagagatttactggggagtcacaaaaccacttgttgctcctttgtcaggtgttttttgggaagtagacatttgaagttcctgggatctcttgctttaggacagacattgccataggagtgctatattttaggggggaggtcagaacatcatttggagcccttgcattagaacagaattgaatgttggagggagacgtgagtagcagaaaaggtagaaaaacagagtttgggacaaattcattgagagtcagagtttggaaagtttgaatcaaatgtctttcacctaaggtccataaagaaatctccctgctgcctccatctatgctagagttctgctgggactaatcaataagtaattagaaagagctaggaatttaatatacagagagattgatgggaggagtctatacagtggtaaatgaaacactaaacccccttgggactttgggggaaagttcctgagaaaggctgagctaactgaaggtcttcagatattcctagctcatccctaaatcataagtgtctcagcttaggccctttcctctgcccttggccactccaggaatcctggatagctggatgcaggtctatctcctcttcaatgtgcccacatgggcctttgggaaggctggcctcagagcaaagacagtgttcagaacagcctataaaacaaggatagtcacaaactggggtggggttgggggagctgttgtgatatgtgtacccaacaggggagggctagatgaacagagcactagaaggtgacttaaaatcaaagaaaaaaatgatgattcataaaatgtatcatgaatgcatggggtaaataacaaaattgttgaaaatttatatagatgtaatttggccatctccaccaaaattgaaaatacacatatctttgattcagcaattccacttctaggaatttatcctacagataggctcaaacacacataaagcagcaggtgcatagggttattcattgtggtattaattataagatcaaaagtgtggaagcaagctgaacacataaaaggatacaattaaatacatcgtagcacatgtgttcaatggaaggccaggaagaccaaaggagtcattcagacttttctgaattcttccttcatgtcaggcgctgtcctaggtgctgaatatagaatggtgatcaaaatagtcaaaaaatccctgccctccagaacttacattttggtgggagatgcttctctttatgtattgatagaaactgatctctatacctccatgttcttttgttacataaaaagagtaagatgcaggcgctaaggaaattctttttttttttttttttttaagacgtaatcttgctctatcgctggattgctgtggtgcgatcctggctaactgcaagctccgcccccggattcatgccattctcctgcctcagcctcctgaattttttttattttttattttttattttttgagacagagtcttgctcttgttgcccaggctggagtgcagtggtgagatctcagctcactgcaacctctgcctcctgggttcaagtgattctcctgcctcagccttctgagtagctgggactacaggtgtgcaccaccaagcctggctaatatttgtaattttagtagagacagggtttcaccatgttggccaggctggccccaaactcctgacctcaagtgatccgcccaccttggcctctcaaaatgttgggattataggcgtgtgccaccatgcccagccccctaatgtcaatgttgatgtttgcattaagtatctttgaaaggacacacaagaaatttatagcatggcatcctctggctagaggacaggagatgttccctgtttactctttggtatcctttgattgttgagccacttggaggttatttatttttttaaaaaaactttaatttgtttattaaaagatagatagaatataattattggccctaaccctgtcccctcacttctgactccaacctctgcaggaaagaaaagggtccagtgcaagagagacggatgctccagaggatcttcttgtcagaagagggaactcctaactaaaagcctggctaatatttgccttagccttagagagctgtatttgcacgggttcctaatggtatctggtgaagcccccatcagtcctttctccctgtgtgtgtgttgataaccaatcaaccttgtttgcctaggactttcttcattttagtactacaagttccatgtcctgaaaaaccctcagtcctggacaactaggagagttgatctccctgaaagggaggagacggagagggtgagggagagaagatggagacctcaatcatgtgcatacattcctctctgagtttcttacctccctggcacttatattctaaagtccccagaacatggctcttctactgattagatacatgacttatctctctgagcctcagtttatttatcaacaaaaggggctaattatcttccctgcctgccactgctaagaaattaatatccttttcctctcccagcctcatgtcatcatggcccttctcatcctgccaagcttctgtggaccatcacagtagttaccctcgctcccgttcagatagttgtctggctaaatcccgacctggctagatacagttattgtcctactctttccctgaacctgagaagaggatgcagttggagaaaactacactcttaggctgatgggtctcactttaaattgtgaccacaagtgactggagggcccttggcactgctgaacaacactggtatttcccagatctcatgactacttcacaccctttcccctccccctaggcctctgcaaagcagtcttagttgagagccctgaatctgatttcactgagaaaatagaagcaatcagaagaaaaatatgtcatctcccccctaccccacaggcacagcctgcatctgcgccaggctctctgccttccctcatgtgctcccatctgaggccagcccttcctccagtgctcccgtgtgaggccagcccttcctcccatgctcccgtccaagactagcccttccctcctgtgttcctgtgtgtggccagcccttcttcccttgcatccgtgagaggccagcctttcctcccctgtgaggccagcccttccccccgggctcccacgtgaggtcgaaccttcctcccgtgctctgtcttccacttttcttaccagctccacaccatggtccctgtgatagtcatttctctctctgtattatccctcactgcccctcatgtccttcccacaccacccgcacttctggattgctgccaactgtttacagagaagctgtcaatctcatctcatttcctacctacccctcttccttcactcactactaaattgtgttccccacaaatgtgtatgttgaagccctcacccccattgtgactgtatttggaaacagaacctttagggttgtaattaaggttaaatgaggttgtaaggatgggaccccaatccaataagactggtgcccttataagaagaggaagagacaccagagtgcatctttctctgtgcacacagagaaaagaccatttgagggcacagtgaagaactgctctgccagccaaggagagaggtctcacccaaaaccaaccctgcttgcacattcattttagacttccagtctccagaactatgagaaaataaatttctgttgtttaacccatccactttgtggtcttgtattatggcaactcaagtagagaatacacttactgtgttctggccacactgactttcttgctatttctcaaaaattccaagcatgttccagttcagagactgcacttcgctgttgctgttgtttggaatgctcttctctgagatccctgtatgattctctcctcttactcaatctcagatcctgtagcagtttctgtgactgtcatatctaaaatagtgccccgtgcccaaactcttcaccctcatactctgtcttatttttctttctactgcttgcctctgcctgccattgtgtttgcttattttctatcttcctcacttggacaagagcccctccatggagaaagtttgttccctgctctagtccttgtgtgggaaacagagtctggccatggcaggtgcttggtgagcctttcttgaatgcataagtgggcagtgtgaagggctccgtgcttttcctggtacaggccattaggaaaggttcactgtattattcctgactgttcttctgggtagtgaccaaagaaaatgccctgggtgacttcagacatagcaggttcctttagaatggaatcaaggaaaaatacatatgttagaggtagagaaatgagagggagccatagcttggagtcacatagtgtgggtggagggttggctgggaagtgtcatagttttggtcttaatcaggcaaagacccagcagaccttagagaattgtatttgcaagggttcctaatggtgtctggtgaagccccatcagagagccaaatccctttcacaaagtcctcaacagcggctacccacctccattgagcactccctgggatcactcactgtgctccagggtgtgaatcaattctaatgattagaagggtctccctcccttctaactgctgctgtgtcccagttctgctctcaagagccacagtcaacaagccttatttttcttccactggaaacttcaccattcttgtttcgtctctaagctcaagatctctgttttcaaattttcctttggcatgaatgaatgagtgagtgaataaataaatgaacggcttcaagatcctcacagtcccagtcaccctcctggtctctgcttgttcagtgacttcactttgaagtgtgttgtccagaacatttcttggaattcttgaatctttagtgcttgatacaagcaaaataataaaggtaagaaaatagtgctcaataaatatttgctggctgaataaatagacaaaaccctgtctcaacgggtctgctgggctggggctataaagaggccacctggggaatttatttttcctcccacaatgagagaaaagattatgaaataggaaatcatcctgccattgctgaggaaagtggggtcttggtgggtcagcacagtgcccgaggcagcgataaaagctcagcctgctaataattcctactctatgaatttatgaaaatcccatattttatcatgcagacattttggaagggaaatacattttctattaccactggccttttctacactcaagccactgtatctgctgctgaaggcaagacagccccctgcctcagtgtctcccgccagcctatggagaccgtgaagatcccaggcatctgtttcctgtgaggcagaagattgtagttggctcactagaccagctatgcctctgtgatgattcactgactctttttgttttaagttttttttcaattacaaaagcaatataagcttataaaaagtcaaataatggagaattatataaagaaacatttaattgtcttcttatttttcctatcaattgtaccctcctctccgagatcattagggagtgacctttcacactttccctatacttacatagaccatatatggaaacatgtacaactgtgccccagtttttgaagtcccaaatcaaatcataccatgtactttacacggaaacgtgcttttattcacaaagacatatatcatgggcatgtttttggccaattgcatatggatctaaataatgtggtctctttttttaacagctttatcgaggtgtaactgagatacagtaagctgcacatatttaaagcatatgctatgatatattttggcacctgtaacactgtctttttagtgctgcatcatattttattgtttggagacaccacaatctattcatctattcctgtattggtagacactgacattgtttccaagtttttgctaatacaaaaatgctgcaactccccctgctccacgcctccacatttattttacccttataaactgaggctttgtttttatggggtaggttactatcagtaggattgctgatcaaaaaatagactcattttacattttaatcatcagtctcatcagattgttttccaagccacagccttagctattacgaacaagaggtgtccctggtttgttctgttgaatccaggaccatgacctcaaaccatgctgtgactccctaaatatacatgtctctgctccaacattctttgtaggacctcctgtctctttcctgaatgggatatcttgggaatggtttggcttgcttcctcacatttgaacggattagaaatatttttaatctggtttaaatctcaatctagttcactgctaattgtaaactgagaccgcttataggtttatttaacttctttgaacttcagattcctcatttaaaatggagacataaagagtgctgcacttattgggttgtgaggattaagagagcaccaatgtgtaaaatacccctaacagtacatggaatttagtatttgctcaaaaaatggcagccatccttattgagtagattcctgaactaacaggaaagcgtccacctgcatataatatccattccacccaagtcaaggaagagacagtttactttgaatatgcacaaaagccccaattagacttaaaagtaacttgtgagtaggaatttgcaaactcttcagactgcaatccagttggatatggcaaatgaccccaactcttctactcattccaactttccagagaaggaaaaacccaacttggtaaacaaaaaaataaataaataaaaataaaatgaacaaaataaggaatatggaactaaattgctggtaagatttaatagctcactggttcagttactggtcatggcaattagtatataaaagtaggtgtctaagaaattgagatcattagcctgtaagaccaaaggcttgcattttgtgacacaccagctcttctcaggccactggcatcatgaggacctcacttcttcattgagagaacatctggtccatattgccacccaaagcaggagcccctgttttgtccatttggcctcttcttagatgtggttgatgatggagagctcaccaccccattagaaagctgttggatgacttgaatcattagacaactttacatggtgcttgtcatccttcccccagaccttcaggatccccttttattttcatatgcttccaaaagtcagcacctgcattttctggtctgcctctgggctgccagaacctaatttgttcaccaatatacatgcaccagcctataaataccctgatccttaccctcaggtgggataattctgggggattgcgttttacaccaccaatgagtctccctgagccaataagcttcagtttcccccagtggtagctggcttaatatctaactccttcttactgccttccctcctctgtgtcagtgccccaccctacttctactatccccacatctaccaattgacctacttgcactcaatccttgtttctgacctgctcctagggtggggacgtataggcagatccaactaaaacaatgcccaaatcttatctgtgacttacaccaactggctctggttcttctgggctctcccgctagaacaaggtgtatcaagtctttgtgtggcttaggtggcttaagtcagctctcaggttttccttttccctaaggtgaacatctccatttccttgattcattgctcccaccctaggaagctttgacccagtcttggaatgttactaaagtttccaaggaagaaaagaccaaaagcattatttaaccacgatgattcttttgtcctggtttgcccatgtttaaggtaagaataacagccccagttctggcagaaagctgtaaggttgacaaaatggcagtgctgtggtgatgcattcaaagagaaaattacttctaagatgcaatgctctatgtttcaagatgaagaaccagggtgctcaaaatgttagacaaatgtcaaagtttatatgacaaatgaataaatagagattgaaatctgtgtcaggcaagaactgtccccacattagtgattctatgtgcctattcccaaagtgatccatgggtcaaaccaaaaagaggggatttgagtccatcagaatcattcaaagggtggagggaagagcatgggatttgaagccaagacaagctgcattcaggtctcagctctgtcactgttatgtgtgaccttagacagatctcctaagcctccaccaataaatttgtagcaggcccttgacaagaatgtgatgtaataaattaaaaacaattagcaatggtgaagcagacagtaaatgatagccagtggagctgcagttgcagaaatattattctgtgaaggtgcagtgaattccagtcttctaagctgtgctctaagcttcagcacaggtgtctgaataaaagctgcacttggcctctcactgagagctcctgagaagtatctggtgagtatcactgtggtagacattgaaggggctaccaaaatcaccagaaccccaggctaggagaggggataaaacatgtgtgttataaccacattaacaggagagaaaatggaggagagaaagaaaagaaacaaaagaaagaagaaagaaagaaagaaagagagaaagaaagaaagaaaaagaaagagaaagaaaaaagagaaagaaaaaaagaaggaaggaaaaaagaaaaggaaagaaaagaaaaaagagaaagaaagaaaagaaaaaagaaagaaaaaagagaaagaaagaaaagaaaaaagagaaagaaaagaagaaagaaagaaagaaaaaagaaagaaagaaaaataaagaaagagagagagaaagaaagaaaaaaaagaacagagggagagtcaggtaagagccttgggagcccagaggcagaaaggagagccagggttattcaaagtcatagccaagtacaatatatgccttgaagaatgaactagaataagtagagacaggagagcaaagtaggtttatggcagatgaagcactgccactcaagggcccaaatattatgatatatagtttgggtacagcaagggctatgtattagtgcgttctcacactgctataaaggactgccagaaactgggtaatctataaaggaaagaggttcaattgactcacaatttcacatggctgggaggcctcgggaaacttacaatcatggcagatggggaagcaaacatgttcttcttcatatggcagcaggaagaaaaagtgctgagcaaaaaggggaaaagcctcttataaaactgtcagatctcgtgagagctcactatcatgagaacagcagcatgggggtaaccagtcccatgattcaattacctcccaccggatccctaccatgacacttggggattatgcgagctacaattcaagatgagatttgggtgcggacacagccaaaccacatcagctagtagcaaggaacatagacatcagatgggaaaggttggctggaaacagaccttctcctcctccttcagggctggatgaggatgagatactacacacagtgcattccaagaacacctttaaattaactcaccagttctccctcagagattcagctgcatatgccttagccactactatgggttgtggggtatggttctgggaccagatgggcttggctatataggaaaatgaatctaggactctgctagagtctctaaaaatatagctgctattgtcccttcaacagggttatagtaaggggcaaggaaattcacattctgctgtttgaatttagatcccttcaacaccttaagagactctctcggctattacctcctccagtatacctagccagccctgtgtgcagactgccagggaaggtgcttgctcaggtagacccagaaagccttgggagtgcacggagctgtcgaaggggcttctaggcaggtcaagggcatcagggagaggcacagagagtgactgcccagggtcttcagacccttaagttgcttttatttttttcactatgttttctggtaccccttgttatgccaagatgcaccagtaggttggaaagcatgtcttcctggaatcagtatatttggtttgatttttagttcctcttctgaattgctgcatgtcactgactatctctgggcactttgttcctcatctgtgatgtgagaatttcaatacccattatgcctgctacacaggactgataggaagatctaactggatgaaagaggcaaaggctatgtggacactaaaatgctttactttttacatgcgtgagcctgctctttgggcctcttccctgctggactgcagaagtcaatggaggcagattcaaaactcaacaccctggagattccaagggggcataaagataaaacagtagtgatgctggggtgatgaagagtctcctggaccctgggcaggcaccaagcattatctccaggcatgctggtagtcagagttatccatctcagcttctaaaatgtttgtgtttgccactgataatgctgacagtgacagacaatgcagttttctcctgctctactcagacataatcaccatgagcccagccccagcaccagcctacccatgctcaggcaggctatggcattgattcttgctgacattcagatagcccctgaggccaccatgcctagatgccctgccagagtttggaacagaggatgtctgcggcagatcctgatggacagaattaggctaagtgagaattcttagcttagtggcctagcagtggggagctcatggaatgagttctgttattcctaccatgaggaaaggccagtggtcaaaggtctaggcctggccggacactgaggccattcaggtgccagatgatcaccagaaactttaggagaaatggggcctgcatatagtccttgcttgagcatggccagagaagatgtgaaggccagtttctggccaggttgttccagttgttcatatcgatctggatatgagaaagcaagaatggaacatgacccatctactgtacttgcatagactgattgctgcccacgccccatttgtttccagtgctccagccacaagggcactcttgcagccccctactgtgctgtggtcattaagcctctctaaccacaagctattcccactacctacaatgccacctccctctcattttttttctaaagctggctggctgacttctacttatccttaagttgaagcacatttttttgatccccactccccaactggaaaagcactgtgttcgctcttgctggccttatagtgtattagaattggcttgtggacattttgtgctcctctagagaggagtgacagagtcatacttaacttagtgtcttctataatgtggatgcacagagtaaatctcaataaagatctgatgggcaggtagacaaatgaatggataaatttacggaacaatgcaggaaaaaactccagcataatgacatcacatggaacactccttggagatttgcagctgggaaatgggtggcgtggcccagaacatagctctccccaggcataatgggttctgatgttcattggtcacaactgaagacactggaaactgcttttgaccagatggtgatgtaaatcaccctgtctaccactgcctcacgtccctggcacacgcaccgttcctgggtgcagggtggcatgatccatgctgaatcctgctggctctctgggcctggccgagataaacatttggtactgatgctgattccccagcagccttctgatgaaaatgagattctacgtatttttccagttcctgttggtaagtcctagtaacttgcctatctcctgtcactggcgtgtgctttccagcccttgcctcctctaccctttatcttcctaatgggttcagtcacaaacctctccctgctcttgcaaataatcctggacttaggaatttcatgctggcatgaggggctctgttggtctacttctcagcaaaacaagcaacactggtgaaactacttttaaaaaaatccaaattatttaaagtctctggaaattgttctaaaggcatacagcaaagatagaaacattcataaaaatctactataatgtggtgagaacaatgagggactgtggcacttgagccacaacttgctccctatcttccacccactacccagttcagcttgatggaagctccatcatgtgtgggtgtggctaagaagacagggcttcctctcccctcagttcccaagctagggttaccacatgtgatagttaattttatgtgtcaacttggatgggccattggcccaggtatgtgttaaagcattattctggatgtttctatgaggatatttttggatattaacatttaaattggtagagtttgggtaaaacagatttccctccataatacaggtgagcctcctctgaccagttatggcctaaataggacacatgattgatctcctgattttccctaagccagagagaattctgcaacagacagcatttggatttcaatcacaacacgagctctttcctgggattcagcctgatggcctttggacttgaactatagcatcagttctcttctgcatctccagactgctggccaaccctgcagattttggaattgccagcctccatactcacgtaatccaattatttaaaattaatctctctctctcccttccccctgtctctgcctataggacagtctttgccccaagtacaacaggctgtgaatactggagccctaaattactctgactccagatctttcgtaggacatgctggaagaaacaagctaatcagaggctagcactctgcccagtgcccagagtaatggctcagagattttgcctagccagtctctaaggagagagactgccaaagctccccttaaaggaactgactttgtttgaaacagaacatggggaagttcaagcctaagggtgtattcagaaaaaataactcctcttattaagagcaatgagtccagttagttcactagaaagaaccagagaaacagactgctaagaaacaccctgctagggtcagagcaaacctcaaagactggtctcaaaaactaccccttttccaatttaaatggaccaaactgctgagcaatttatgtcttaaggtgttgttgaaaacagcaaagcaagcatctagtaattagtggaagttaaagactgggtgtaataccaaatcaggaagatagtttaacagacagattagtaaacaagcatccaaagagagctctgctaaaactactgctatcctaggtgagcactgaggagcaagcaacaccaaaggcttaacactgcatggggaatagacttagctaaaatatcccagccaagtcacaaaacaaataaataataaaacaagaaacacaagagctggagttgtgggagggaaatcagtatccagaattgctataatgtattacctaaagcatccatttttcaacacaaaattatgatatataaagaaacaaaaatgtgtgacccatatacaagaaaaaaagcaggcaacaaaactgcctgtgaagggaaccagatgtcagatttgacaaagacatcaaagtagacattatacatacgttcaaataaccagaggaaagcgtgcttaaataagtaaagaaatagctcatcaaatggaatatatccaaaaactggcagaaattataaaaaaagaaacaagtggaaattctggagttgaaaaccaaatcaacgaacatgaaaaattattagcaaggctcagcagtagatttgaatgggcagaaaaaagaatcagtaaatttgaggatagatcaacagagattattcaatccaaagaacagagagaaaataaaataaagaaaaattagcagagcctcagagaaatgtgcgatacatttaagtgtaccaaaataaatttcacaaaaatctactaaaatatggtaataacatgagggcctttggcacttgagccacaacttgctccctatctttcccctcccacccccagttccgcctgatgaaagggccagcaggctgaagacccagaggagagctgatactacagttcaagtccaaaggtcaccaggctgaagacccaggaaacagctgatgtggtttaagtccaaatgccgtgtgctgcagaattctctctgggttgggggaggtcaaaatgtaaaaagagataggagcagaaaaatatcacaagaaataatggctgaaaaaccccaaatttactgaaaaaaaaaaatcaatttacatatccaagaatctctacaaactccaagtaggataaatgcaaagagctccacacccagatacagtaaaaatgctgaaagtcaaagtcaaaaaaaaaaaaaatcttaaaagcagaaagagaaaaatgactcatcacataaaagggaaacccaataagattaaccattgaattcttaccagaaacaatgtaagtcagaaagcagtgggatgacatactcaaagtgcagaaaaaagaaaaaaaaaatcttttaactgagaatctaatgcccagaaaaactatctttcaaaaatgaaggtaaaataaaggcattttctgataaataaaaattgagagaattcattgctgaacttaccttatggaaaatactaaaggaagtgcttcatgttgaaagtaaataagcctagatggaaatttgaatccacatgataaaaacaaagagcacaagcaaaggtaactatataattataaaataaagtataaatgcacgtttcttctttcttctcttaactgatttaaaaacaaattgtataaaacaatatgtatataattgcattgttgcacctgtaatacacagaaatataatatatttaacaataaccacacagaaaaggtagacaggagcaaaatcatattggagtaaagaaatgataacagatggtaatttgaattcacagaaacaagtggaaattctggagttgaaaaccaaatcaatgaaaatgaaaaagagaatatgaagacaaacaaatgataaattaaaggtaaatataacaaattctataaatgtatacatgtcttcctttcttttcttagctttaaatacatatacacatatatgtatatacatacgtgtacatgtatatacatatacacgtatgtatatacatgtacacatatatacatatatgtatatatacatacatgtatctacctatatatgtagatatacatgtatatctacatatataggtagatacatgtatgtatatctgtagatacgtatatgaatatgtatatatgtgtatatatgtgtgtatatgtgtatatgtatgtatatctacatatatgtatatatacatatatgtgtgtgtatatatgtgtatatatagtttttatactcatatacctaatgacagagacctacaatttatgaagcaaaatctgaccacattgaagggagaaatagacagctgaacaataatggttagaggctttaataccacacttttaataatggatagaactcaagggaagattaacaaagaaataaaagacttgaacaacactatacataaatcagtcctaatagatctctaccgagtactcaattacagcagaatatacatttttctcaacgttttctcatggaacattctccatgacagaccatatattaggccttgagacaacacaaaatatattcactgattacaatgggatgaaattagaaattaataacagaaagaaatttggcaatttcacaaatatgtagaaagtaagcaatactctactgaaaaatgaatgaatgagaaaataaatcacaaggggaattagaagaagactttgagatgaataaataaagacacaagatacagacttgacaacgatgttctcctctgtgaaacgggtaacataatccctgttcagcctgtcttatagggtccttctgtaggtcacatgaatctatgattgtgaatgtactttgtagattgtcttacaggtataaagttctactatgatgaactctctgctctcctgcagggcacgtgacacaaaaccttgctcccatccagccgtctttttttttttttttttttttgagatggtctagctctgtgatccaggctggagtgcagtggcatgatcacggctcattgcagctttgaccttgtgggcttacgtgatcctcccacctcagtcccccaagtagctgggactacaggcatgcaccaccacgcccagctaatttttgtatttttggtagagatggggtttcatcacttgcccaggctggtcttgaactccagagctcaagtgatctgcctgcctcggcctctcaaagtgctgggatggcaggcgtactccattgtgcctggccatccttcccacactttacctggacctggagatccgttgtttatgctttgcttcttttacctccagttgagatgaagatcatgctactcttgcttcccactgctgctgtcaggtcatgccacctctccctcagattctccccaacttccatttttctccctatggactccacagaatgtgagatttgcaagtccagagagggagtgacttctccaaggctacaggccaagacagaggcaaagcctggactaaacctccctccccttcttccccaggtctgcagggtcctcaggacactcccctctggtctctgatgcctgcctctgacaggcgggcctcacctcaactccatcccctgacatcatccccgcatcttcaagtcactttagttttagtgaaagaagccagtgctaattcagtgtgtaacatgagctagacattctgcattctcaggtggccctcaacaacctcaagtggaaggtaccagtatcatttccatttcagagatgaggaagtcaaggcttgcgaaggttaagcgacttgctagagagcgcacgccttgaatgtaacagagttgagctttgagcccactcaatctaactgcaaagcccacccttctgccggccacactctctgggcagttcctctcatctcttgccctcctagccacctgcctccttaagcacccgcctcctggtgcctgcttccctgattccttgcagctttccctgagcactcttgggcttctcccatgcaaactgccacctcccaggtctggagatgtggaatcttgaaccccaaactctggtcctttcacctcttccatccttcagtgcaggggcttggcctgcatccagagcagtttatggaaactcctttggcctcagatttagcctctgcaagaggagacacagtacagtccttcctcacagggcattcgggagaaagaagtcctgagaaataatggtgcattatttaaaagcagggcttcctgataggaaagaaaaaacagaaacccagaccccaattcactaactcatcatgggtagggtggaagtggcaggatactgcccctcctggtctctgcctccctgtctacaaaatgagatggcacggtggtggcctggggattccttccacctcccaccttctgggccacatgagaatagaagctgccctcatgatctctgagctgccttacggctctagaactccaggatgataaatatataaggcttcataatgtcctttcttccttcgtgtgcctcttaagtgattagtgtaatactctgtacacaatagacttttaattattatctgtggaacgcatgcatgcgagagccacgcaggagctcaaatgggaaggaactgaagtcccatgggacaacagtccacggaaacatctccccagccttcttttcaaggggaacacaggacacgtgtctgcagcatggccctgggctcagggggccctcggcacagcctaagaacacttggctgcccctccagaggtgagaggagagcaagctggctcctgctctcctttcttcctttccctcctgggcaggggagcaggaaggtgaagcagcaccacctaggagagaaccgggttggggtgcaagagcacagcttcctctggagctctggcaggaagggtggtgtgtgattctccctcctggaggcctttctgtcatgcatgcttcaggaccctttccctccctttccccctaccccagggaaacaagacccctctccttctccagctgctcccccaaccccaagaccccatctttgcttggtaggactcacttcctctactgggaggagagcggcgaggcgttctctctgtggagcacaggagtgctgtctaagagtgcaggtgggggctcctcggaccgtgtgggaggggcgctttcaccagtccagcccctgttcctctcctctactcctgtgggcctgggggtctctcacatggatctcactattgaaggggaacttcttagtggtcccaaccttagcaccagtttcatgcacagatcctgagctggctgtccccatctggaccgccctctccatggctccctcccacacctcagagctgtcacttggtgggcttgtcatgcccaccagactgttacttatgggaggagaggacgactgcctctcttacagcttgccccggcctgacacagcctccagtcaacacccacttcaccgtcagccctgcctgctctccaatttggtctctgtcatgctcaggcctgttctatttctaagtccgtccaaagccagtgtggattggagaaagagggttattggcaggtacaggattggggggcccagctttgtgtgccttgaaatgtcccatgctgccaactccaaggctgtgctgccagtgagcctcaggagtgcccgagtctccccccatgccatcttctgccaggcgggacctcagttagggaccagctgtggggaccagcctccctctttgatctaaatatccactttccagtttttcatgcagttcctcacttccttcctctactcctgtccattgcatatctattctgtgccagccactccgctaggtgtagggaatgttgttgtgatgtgtgggtgtgcagggtccctgagggagaaactgaggttcaaggaggtcaggtgaggggtgagcagatgtggtggagtcagaagacccagagagcccttgtcccactctgcagaagactatccaggaccctgggcaaccccttcctctttcctggactttggttcctcatccttaaatgaacagattgcaaggaactgagggggaaacggtggttcctgaggtttggtagactgatgaagactggatgctcttctcagatgagctcatgtgcacgatattgtgcaaaataaattcagtgcactcaggaggccctggagcctggggtgagatgctcgctaggaacctttacattccagaaataacttagtgcctagggcccagtggttaataactccaagatgacttagtgccgagggccctacatttaataacaggacttagtgcccaagaccctacagttaataactccgaacagtgcccatgacctgcaccctatgtggagtgcacccggatgtcagagtttgtttttctgtttataatgctttgtttgttttgttttgatctaagatcattgagacatcaggcattgtctgattgggctagggactcagcagggctgatctgtgatttctggagtcttcagagaaagcttcctgtatgttttccttcctacttacacccaaccagaagcttaaggcagctggggatggggagaagggggtgattcatctttctaataaaacacatccatccagtttcctggggaaacacattggagagatccccaggcaagactcagggaaataaagtaataatgttatcagtcttcacagagctatttaaatacagattgggttgctgggagatgaaagggggccccttttgttatgaaaatgaagggagatgggagggttgagtttgtgttttgatatgttaatcagcttggaagccacccagggtagggacgggtggggaggctgagttgcctggcatatttatttgttcagtttaatttaacagctaggctacaactgggctgcagtcgggattgtgtaaagatgattacagccctatcattaatcagatgcctgcaggagacggctcatagcttgctgctaccttggctgcatacagatctgcagccgccctgacacggcaccaatgtggtctcattccgccatctagtggcactgccaggaattgttctgggaaagtcagaaaaacaaagtattttggtttctttttaaatgatgcggccaccttctagaataaacagaaactgctgctgtttctgaagagataagatatagaaaggtctttggaaattaagtgaccagtcttccctttttaccgatgctgaatttgaggtctgagacagtaattttttcaaggacatagttttttttttattgcgactagaattttgaattccaaatccattgattttcctaacataccaatgtatataaacacggatacgtctccatccctcacgctttcatccattctgtttttcaactcttctgtataacgttttggtttactttttctttcctttggattcagatcccgatttcatttaattctagtttcccctgctccctgcatagaatgacttagagtccaattaagaaacaattactccagctgatggagggtcaggggagctgcaacagcaaagaatgaactgtcctgtagaactggtagacttagggggcagaccgggtgtgctgagaggcagcgggaggctgggagggaatgctaggctttggagctttcctcagcccagcttagggaagccgggggtgggggtgaggggtggggtgggggtggggaagattatactttggttttactcttgttaaagatgtccttctgttaacatcccacatttgtcgtctaagcaccacctgacagagcaggcactgggaaggagtgaagagcaaggcaagtccctgccctctagaaggttgcagtctgggtagagactgacccaggaacacatacacagagtagggtcatttttccaagagtagactcagctggtggccctctgagagtcggccctttcaaacagaaatttaaaaaaatattaaaattaagataaaaaagagtttcactttttcctccatacctctcagaggaaattaaaatgaatctaatttataaccttagcaccacttcttctaacccctttctctccacctcaatcattcccatactctacactctgaacgctttcattagcaaaaaaaagtcaaaaggtggggtggttagaagaatgaaaagacaagccacagactggaagaaaacatttacaaagcacatatctgaaaaaggaattatatccaaaatatacaaagaactcttaaaattcaatactagcaacataagcaacccaattaaaaaatgggccaatgatcttaacagacatctcaccgaagaaaagatatatgtatttatgactctttcatgtcttttggggactggatagaccatttccttttatcattgaataatatccatggtatgggtctacatagatggcagataagtatacaaaaagatgctccacatcaatgtcattaaggaactgcaacttacaacaagagtgagatgccacatacacctctgacaatggctaaaatccaaaacactgacatcaccagatgctggtgaggaggtggagcaacagcaactcccattcattgctggtgggaatacacaatgttgcagccactttggaagaaagtttggcagttccttatggaatcaaacatattcttaccatataatccagcaatcaagctcctaggtatttccccaaacaagttaaaaacatacatccacacaaaaacctgcacacaaatgtttatagcaatgttatttataattgccaaagaactggaaacaatggaagcaatcaagatgtcctttaataggtggatgaatacactgtggtacatccagacaatggaatattattcagtgatataaagaaattggttgtcaagccatagaaagacatggagaatcctaaatatgtattgctaagtgaaagaaatccatctacaaaagctacataccgtatgattccagctatatgacattctggaaaaggcaaaactatggagacagtaagaaaatcagtggttgccatggattgggggaagaaaaggagggaagaaggggtgaagcttgggggtgggagtctttttggccagtgaaactatcctgtatgatactgtagtagtggacacacgtcatcatacatttgtcaaaacccatagaattgtataacacaaagaatgaaccctaatgtaaacaatggactttagttagtaatgtgaaaagaaaaacttcagctgaattaaatttaaaggagtttaattgagcaatgaacaattcgtgaatggggcaacccctagaatcacagcagcttcagagagactccagtgcagccgtgtggtggaggaagattcatacacacaaaaaagggaagtgacgtaaggaaatcggaagtgagatacagaaacaactggattggttacagctcatcctttgccttatttgaacacggtttgaacacttggcggtgtatgagtggtttgaagtatggctactgggattggccaagactcagctattgttacaggtgcatactcctaaattaggttacagttcatccacgaggtctcaaatatagaagtacagagtccttctcaggccatatttaggtcactttaacagtaacaatgtatcaatattggctcatcaattgtaacagatatatcacactaatgcctgttgttaataacaggggaaactgcagctgccggaagagagcgtacataggaacactctatactttctgctccatgtttctatgcacctaaaactgctctaaaaatcaattttaaaaacaaaaaataaaaagatgggtgggaaggggtactgattcccttcctccaccccagcctccctgcaccacctctctatccctgttctttatggggtaggttgtctgaatctctcccttgcatgtccctcccctcttctctcacctttgagaatcaactcttctcagcccatcttcagattctgctcctaaaacatcagggatgatggtggggggaggggtggagagtccatccgagttggcaggtggcgttccttctggttagaggggttatgcatattcattgtgagaaggttcccagcatctgggctccggatgtcacacagacactccgataaagctatggacataccctaaggcctcctagctctaagcaggcccagcagctcagaggtcacccctgagctcctgggggcttcctgctcctgggagcagctaattgtttatgcatctctctccctgggtaaactgcaaactctgaaaggtgaagactacatctaattcatgctgttgttccttctcagcataactctagcatctaaggcagagtatatgctcaaacttcaattatcaaataaatgtgttgatgggtttagtatatgtgttaaagaacagttccctataggctggtgcggtggctcacgcctgtaatcccagcactttgggaggccgaggcgggcagatcacgaggtcaggagatcgagaccatcctggccaacatggtgaaaccccatctctactaaaaatacaaaaaaagttagccaggcatggtggcgggcacctgtggtcccagctactcaggaggctgaggcaggagaatggtgtgaacctgggaggcagagcttgcagtgagccaagatcgcaccactgcactccagcctgggcaacagagcgagactccatctcaaaaaaaaaaaaaaaaaaaaaagaacagttccctatagacagtgagaatgttgccttgtataacaaaaaggactttgctgatgggattaagttaaagatttttgagctgacgggattattctggattattcaggtcaggtcaaggtcatcaaaagtgtccttatgagagggcagaggaaggcagggggacatttgactacagaaaaggagaggacaatgtgaagaagagatcagggtgaggtggccacaagccaaggaatgctggcagccaccaaaaagctgtaagaggcaagcaaatggattctcttcaaaacttctgtgtggagcacgaccctgctgttaccttggtttcagcccagtgaaacccatttccaatttctgacgtctagagccataagaccctatgtctgtgttgtgttaaagcctctcagttcctgatgtgttacaatagcaacaggaaacgaatacagcatcattcactggagatgtttccttcctggtttggtttatctttctgagtctctctttgggatgtcactaagctcataggcttatgctaagcagaaacctgctcttagagatgaatgatacatttgaatggacatcattggagactgaatgctttagttgatcatttaacacccttcattgggtaacaaaatctaccaaacactgtgctctgtttgggacatactgaaagggaaattagttcttggtcttcaaggagtttgcaggagaacagggaggcagtcatgtaatgaagaaatactagatctaacgtgacgtaagagtgtgcaaacataaacacgcaggatacagaggggaccaaaggaagaggtgacccactgggtgaagaaggcatcagaggatatttacagaggagatgttgcagcagctgagccttcacaggcaagttaggtgcacgaggagggcagagagggcccctgtgatgtgcagggtgaccccctcaacatggtgatggatgataagcagggtggggaagggagtgggcatcatgaccgggaacatttgctccaatcttgctaagcgcatgtgtgcatggtcagtacacccagccggcagctctgcttcccgttttccctgtaattgaacattgcaccccaatactctatcagcatgatctgaacaggcttgatcaatgaacaagacaaccttcaaatggaccaacaggataagtggcatggccttcagccagccagggcacctgaccacaggtcatcaatgtctccccagagcctttggactgctgaccactgacctattcaatgccagccttggctctgagacagctgctgacagagtcacctgcaggactttccaaacaccagcccctcagatggcaagtgcagctcaggtgtctttatggaattatctatcagatgctccttatcaccagaaagttgttgggcctgcagctttaggattaagagttcagaaataagttcccatatacacactagggaggggacctgtttcagatgtcagagctccaactcaattttttgacagcaagccaaggtggccttctgaaaggatcactctctccttccactgtcctgccacctgcacaagtgagacctacactcacaagagccagggcttaccttctagcatctggacccaggagatgtttctgagctcccacctgggctgggaagggcacttcctgcccctgccagcagagactctgaggtaggaaagttactaaacacttagagaacctctttaagaaggtaaagagaaatcttcaaggtaaagtgacagcccaaagagaggcccagaaagataaacagaacaggaaggaacaatctccagtggaagatgctgtattggttttctcttgctgttgtaacacatcaggaactgagtgcctttaacacaacacagacgtagggtcttatagttctggacgagataagttggaaataggtttcactgggcagaaaccaaggtgacagcagggtcacactccacacagaggttttgaggagaatccatttccttgcctcttccagctttggtggctgccagcattccttggcttctggccacctcagtccaatctcttcagaggtcctgatactagtgaaggaacaagaggacactaatgttgggctctagagggagaacgcccagggagtttcctgattcttatcatgactagaatccttcctgcccttctcttccttttcctcagccccaggaggagaacgaggagtgagattctggaagattctctttgctgtcattgtactactgtccctattctaacaagggacaaagtgaagacactttctcacttgggacttcctcctagttactagcagattctcctgcgggacaaaaggcagaagtttcccagggtaggcatggtgactcacacctgtaatcccaacactttgagaggctgagaggtggaaggattgcttgaggtcgggagttcgagaccagcttccctccctggctggatgttagagttctgctctttctgcctgctccccactgttcattttgcacttaatggccttgattatgactgagaaattcacaagatctttggaccagctccttacttcaatttaagtccaaacaggaggtgggggcacatagctctcagctgaccccacaacaaatacagctcttagacttctttccctgagccccatgttttatagaaaacaggagtatacacaagtaaatgtatcaaaacactcttctgtattctgctctcaggatccacagttcagcattttctcagaacaacctgcaaccttaaacatctgttctgtgactgacacttttagccccaagaaacatccctttcccacccaactcttgccccatgtcctccaaaccaaaggcagctgtgttggcattccaggcaggtgtgtgctgagaggctgcaacctcagaggccgacagtgctctggaagattgggagggtatgagctgcagaagcctttccgtaagcaaaaagagaaattaattaacttgtcgaatcctccctctcagatagcttgagaacaattgatttctgcataaagaggacgatccaattcttgcttatttggttgcaatgtgtggttctgatgaaactcatgacttgctgcagtattcacaaaaccgcaaacactgtacatggtggctgaagatcatgtagcaataataaccaaaattcatccttttcttaaatgtgtgtgtgtgtgtatatatgtgtgtgtaggtactgtatatgtaacatctgggaagtgtgataccaattcttaacattattgtcatatgagtatagatattgctaccagagccagtgagaagcttaatataagtgatagagattttgtaatgagattcacatattcaatattttttgagaaaattatttattgtatacagtcccattgcattgtttgaacatgtgtataaaatgtatagtccttttatgaacctaaggattgctttactactattgacaatcccagttgctactgtttgctatggtttgaacgtttgtcccctccaaaactcatgttaaaatataatccccagtgtggtagaatacattaagaggtggggcctttaacaggtgattgaacaacaagggctctgccctcatgaatggattaatccattcacggattaatagattaatgagttagtggatccatgggttatcatggagggggagctggtggcaatgtaagaagagaaagggcatcctgagctagaacattagcatgcttgagtccctttgccatgtgataccctgtgccgccccaggactctgcaaagagttcccaacaagaagaaggctcccaccagatgtggcctttttaccttggacttctcagcttccttaaatgtaaaacataaattccttttctttataaattacccagtttcaagtattctgttatcagcaatagaaagcaagctaataccaaaaaaaaaaaaaaaaatggtattgagaagtggggtgttgctgataacagatacctgaaaatgtgtaagcattttcagaagctggaagaatttggaagagcaggctagaaaaagcctagatcctagtgagggcttaaaagacaagaagataagggaaagtttggaactcctcggagatttgttaagtggttgtgaccagaatactggtagaaatatggacagtaaagaccattcaaatgaggtttcacatggaggtggtgaacaaggtattggaaactggagtaaaggccatccttgttgtaaattggcaaagagcttggctgaactgtgtccatgccagagggtgctgtggaaggtggaatttaagagtaacagaagagcatatctggcggaaaaaatttctaaacagcaaaatgctcaggctgcttcatgattacttctaacttcttatggtgaactgctagagaaaagggaaacagagtgaaaaaattggaaaaacgtacagcctggccatgtgggagataataataaaaagtatgttcagaagaagccaaggatgcagcctgttgaccttttgctaaagagattcatatggatagaagggagccaggttctattcctcaagacaatggaagaaagaccctgaaggccatttcagagatctttgaggctgcccctcccatcacaggttcagaggcctaggatggcagaatggtttcaggggacaagcctgaggtcctcatgatggccttgctgctcagagtcacctcagggctctgctcccttcacccccatgcagtgctccttggctaccccagccttggatcaagtggtcccaggtgtggcttgtgctgccgctctagaaggtacaagtccatgtggtgctaattctataggatgacagaaagcagaagctgtggaggccacccagatttcaaaggatggtatagaaagcctggtgacccaggcagagacttgttgcaggggtagagccaccacaaagtccccactagggtaatgcctagtggagccatgggaacacactctcaccagatgtagccccttgaccttggacttcccagcctccagaactctaagaaagaaatttgacttcattataaactgcagtttcaggtattgtgttatgagcaacaaaaagcaaactaagatactgtctcaccagagcagtttgttaaaattggaattaattttgaaaaaataaaagtatctaagaattataatgactcaaaaaaaaatggacttatttgacatagcattaaataaaacatatattatgtgaaaatactgactacaacacaattagcgattctgctggaatgaaagcaggaaaaatattttatggaatatatatatagtatttataaataatgtatgtttttattttattactcatttgaacatcactggattgtcaacagaacacccagatatgtgcaataaaaattgaaatcagtcatctttgatgttttgctgactttcagacctatacaaatcatagccagattttataaagcaagatataagtgtgtgtgtatatatataaagctctctctatagatatgcatatatataaagctatatatgtgtgtgtgtgtgtgccatagatttatatataaacaaacatagcaaaattatttatgtgtatataaagcaggatatatgcaagatatatatatatatatacatacacacatacacaaatatgtatgggtatgtgggtgtgtgtgtatatatataaaaccttactttacatatacatgtatatacataattataaggtgtattcttgaaggtaagaggacagaacttatttactttgatgagggagttgatttttgtctcttgaatatttagacttatggtctatgggctgccattgttctcttcttgagccctttaaatttaagagtggtcctgtccccaggccctgactttgcaacaaacctgcagtacctgattttgtgaaatgcatgtattaaacctaaacaagaggcgcttccttctaaaatatttggttagcagactggctcttgtattctagggcaataatttttggctgaatgggatactcaggtagcttattagattccagtctagacacacctggatgagtgtgtaccaggtgtagacattcctcattcatctgttctaaatccaaaggcagcagctcatgacactttagctttctttttctttctccctttcccaccaattctctatgtccaaactttctgccaccttcatcccaatccatagactatcctgcaaatacactattctcagatgtcacagtttaagagattttgttggatggattgagtaatttttttgtgttgttaaaatccagagggaactgagtggtgcttggattgaatctgctggttgggttatgggaaatcagccattttggaatgggtgctggctgaatgaaggagctctgtagggaatccgggggccctcaacacagggatgggatgggggaaggctgcctgaactcatgccaggctctgactgagcaccaggactgattcagagggaccactccaaaggatcttgctgcagatgtggtctggcctggaaaaatattccagtcccaaatggaatggagtgatcaactctcagggagggacttcagcttgagatggaagacgtgagcttatgccagtggtggctcatgtggtccaggctgaaagaaatgccatggccaagaacacaaacatatgatttcaaaatgacaccagttaccatggagcccctcatacactatgaaagagaagcacagttgactctaatcatcttctacattcacttttctctaccttctatttccctcccaccctacagctgagaatacaaacctgtttcaaaacccacctaagacctccccagcgcaagggctttttttttttttttttaactttctaccaccctttccagagtcctcatttcaaagcccacaaatcagttcaaccactacttgaccttcctaggagtcagggggtagggatggaactgagtgaggacagccagcactctctatggtaggcaagggtggatgaaggcatggaaaaactggttcactgacaaatgtcagcaggtcacaccttcttaaactgaaaggagaaatgagtgggccatttgatcttgcaaatgcctgtagcaggggctcagacccaagcgaactcagcaggtgctgagaatggtatgtaggctccaggcaggctgtggaggtggcacagccctggaggaatggtgacatggcaatgctaagccccagatttatggaggggggcaaccaccacattgggtcctgggacccaaaagacctcacaggattgaaaagatatcaaccatttataatattctcagggattacagctcataccccattctccatgttttggatggggagaagaatttgaataagggggaaggagtgggttatgggagcttgtattctggaagcaggctgatgtggtgtgcagcaactcacttttatagtgagtttgcttaccctgaagttttgggttcactgaatgcagaaacatgatgaccagaccattatagtcaccatttcatggctgctccatgaagtggtgataccagtggtttcctccccaggtctactctttagagacacagtctataaccattttcagaaaggccgctcccatagtccttactaagtggacacatgactcctctcctggccatagccgttgcacagcaatggatacacgactcagtccaggccaagtgtattttttatgtttgaactttgttagcactgggctcaaagatactgtatttgatggtaggagggcactgggtgtcccatgttagagcagccatggttggggatgaatatgtgaggagagaaaaaggttgcagatgggcagagaagcagaggtgagtgactcctggagaggaacctcagtccctgacttccagtccgttgcggggccttggctcctgtcagatacttttctgtccttcttgttgctctgttttatttaagctggtagagtaggccccatctttgcaatgacaagatccctgaatcagacagggaaagggaagcctacagaggagaatgaacttgaccaatgttacacagttaagttagaaccagtatcagatctctgactccaattccagggctctttcccctcaaccatgctgcccccagcttcagtgaaccatgaggagctctcaggatacaagtctcctgactacgacttcttggagttcagagaccatatgtcttgttgattgatctctctccaggatttaacatcatgcttggtgcatagtatgtgctcagtaaatatctgtagaatgaatgaagaatgagtggaggaagaacacagctttaggctcatgatctggtcactctgttcacttaattcagatcagcagggcaggaaagggtgggatgctagctcccatctctagccctgaccttcaggtctttcagcccttcctcactaaattcaagagcatcctctggttccatagcagaagggccttttcccttctccttgggcactgggatggattgcgttatctattgtttactagtttccagttccattgccaggggagggttatgctttccctcctttcaaacttaggtgcacccaagtgacctgctttggacaaagaaatgtgagtggaggtgagatgagtcactactgtgcagaagttttaggagccactgccggacacattttctctttcctctgctgcatattccaaataatggctgctccttccttctgggtcccagagtgagtgaggatggtgctgagaagatcccaggccaacctatggtagacatatgtaaagtcactgagattttctggttgcctgttactgaagcacagcttgcctttttatgactgatccagggcccttaccctctcttgacaggtccctttcccccagccctattcttagaaaccactctgcttatctttgtttgtgttggaggatttcccctgcatcaactccatcctgggggctgccctcctaccccaacaagccttttctagtttaagagtctttgatttcggccgggtgccgtggctcgcgcctgtaatcccagcactttgggaggccgaggcaggcggatcacgaggtcaggagatcgagaccatcctggccaacatggtgaaaccctgtctctactgaaaaacaaaacaaaacaaaacaacaaaaaaacaaaatttagccaggcatggtggcgggcacctgtagtcccagctacttgggaggctgaggaaggagaatggtgtgaactcaggaggcggagcttgcagtgagcccagatcgcgccactgcactccagcctgggcgagaaaacaagactctgtctaaaaaaaaaaaaaaaaaggctttgatttcagaatgagaatgtactgtcctggagcagccagcattcactgagccttagtgggtgtgttagtctatattctcctgcttataacagaatacctgaaactggataattaataaagaaaaagaatttgtttcttacagctgtggaggctgggaggtttaaggtcaagggagtacatctggtgggaactttcttgctgatgaggactctgtagagtctcaaggcagcatggggcatcacatggcgaggggtctgagtgcactaacttgctagctcaggtctcttttcctcttcttataaagccaccaattcctcctccatgataacctattcatcctttaattcatgaatggatgagttcattcttgagggtacagcccttatggtccaatcacatgttaaaggccccatctgtcaatactgccacactgggggtaagtttctacatgaactttggaggggacattcgcacaatagcaatgggtatgtaagatggaaaccaagccccttgtgccctttgatacattcacgtgcctgacttttcctctttccatcttcctgattgttactttctctcttctgctcatggaccatcagcctgggcgtatgctgatgctgacctgtaaaactgctgcctatctagccatcatcatccagcacccgtgtcagcacccttgctcttctcctagatagtctttctggaggggaaaaagcagcagtcaaaactaactgtgatggtgacagtggaacttgatggagcataattgttttttgttttttttttgagacggagtctcgctctgtcgcccaggctagagtgcagtggcgctatcttggctcactgcaagctccgcctcccgggttcacgccattctcctgcctcaacctcccgagtagctgggactacaggcgcccgctaccacgcccagctaatttttttttgtatttttagtagagacggggtttcaccgtattagccaggatggtctcgacctcctgacctcgtgatccacccgcctcggcctcccaaagtgctgggattacaggcgtgagccaccgcgcccggcgatggagcataattgtaaaataactttcttttcccctctcaggaatatctgacaaaccaaccttatcaacccttcctacccacccaaagatgttgtctcaggcaggttcctcaatttcctgtcactttcaggaaatgaaaagttcttaggtcactgctggtttcaaaatagtatgatttcagtgatacaatgtccagtcttctgcagttcttaaaaaatctgaactctaagtttcttgccatttcccctggaatcttggagtggaacacagctatgcaattgagttcttgagagcaagtttttggagaacagatgggggacatggatgttctgtttgactggtgctatcatgatttgactctggagtcagatggggttagaggatattccaagatgggattcttcctttaggcacattcgtgaggtctttggcgtcccttcccgtgggctccgctgtaccgcacagccccagatgtgggcaatgtattccccatgcagtatcttatgacctttccaccttgactcctattacaagcagagctgcttgggaaggggtctccctgctctagtaggccaccctctcttggcagggacccttaggagtggttctttgtcttgccattgcaggtggcttagcatataatggtccctctttattggaggttttgctttctatggttttggttacccacggtcaaccacagtccaaaaacaggtgagtatggtacaatgagatattttgagagagagagaggccacatttacataacatttattgcagtatattgttatagttgttctgttttattattaattgttaatctcttactgtgcctaatttatgagttaaactttatcataggtatgtataggagtaaacagtgtatttagggtttggtagtatcattggcttcaagcagctgctgaggcttttggaatgtatcccctacagatatagagggactgctgtactcaaagagaagcagatcacactctccaagtggtttccttgaagcctctctgctaggcttgaggtagaggcagtggcaccagataacacctccatataatccaggaacaatgggcttcaaagcactcttctccctcagacttctcaacctccatgttctgtgcctcaccagggtgttgagctagggctgagcttgtttttggtggcttctttcacatatctgcatgtgtaatgtagcatcctaaatgtgggattattattattattatttacctattgtttagctctcactttgactgaggagatgattcttagccaaatcagaagaaaaataacagttaaaatgaagctgtatgctgagagttaaactctgtgctatttgatctgtggtgaaaagggtaaaaaaagaaaaatcacagctgttttggtttattcctgtgctatttcctgtgtttattccaaaagcccattcctctcaactaccattgcctcatttacttttatttgtcagtggattttgatggcgataaactctaatacagatataagcattgtcaaagacagacaaaaatatgtggcagcccagccggctttgcttatgataatttttgaccatcattaaataaaagaaaccacactgctatttgccctggaccaggctgcacagagttttccatttgtaaagcatcttggtagcagatcagtgtgtgcgattcagtgcatctgctctgctgaccttggatttgaggctcacatttgaaagccctgcttgtctgctgtgtctctggtgcctcattgtgcaaggcataaattcccagtgggaacccaccttggaccccagtgaacctcagtttctgctggtctctctttgtgacttttccagggcgttcaaaagtatatttcctgtgcgctgcagagttcatgttttaaatcagaccactggaaatgtaccttatgatgttgaaggaaactcactcagctttgtgtgtgtgtgagacacggtgataggcagatttcatataaatgtgtttgcgtataaattagtgagtgtagaaatgaaaaagcttcaaaagttaaaatcagaggttacaatttatttccacaagcaggaaatccaagaaactttcagaagctgttcatacaagttttaagaatacaaggcacccttgaatcaattaactcatgtatgaatatataagaaagttagaggatatttacaaaccagctctcataaaatttaagttaaatctctacttaatttatatcagataatgctaaagtaaagtttctatctgatccgtatactacaaaaggacaaagagtatttctgttttattgaaggattttaaaattctaaggccaatttacttgtaaccttgagactatgaatatttttagacaatacatttattagaatatttattctgaaaactgttagttaaggttgtaaactttgctataggaggtgaattttacccaccaatcttgagataattaacccattaactgctgcttcactgattcagttccaatgtactcaaacagtgtaacatctacataaattctaatagaaaatctaaactatgtgggaacatagctaaaggcagcctttattgtaaaaagttacatacacaatttttttttttttttgagacggagtctcactctgttgcccaggctggggtgcagtggcgcgatctcggctcactgcaagctccgcctcctgggttcacgccattctcctgcctcagcctccccagcagctgggactacgggcgcctgccaccgcgccctgctaatttttttgtgtttttattttttttattagagatggggtttcaccgtggtctcgatctcctgacctcgtgattcgcctgcctcagcctcccaaagtgctgggatcacagacgtgagccaccaagcccagcccatatacatttttttaaaaagtaactcccacatttaaatttaaaatgcagtgcagaatccttgtttacattatctaagggtctagaatctccaatgcaagatgcttaaagagagaatttatttttgcttcttttcctgggaatctacaaacaagcatataaatgggcctcaagctgaggaggtgtgatggtttagagagaggctggcattttctatccgttggaaattcgctttaactcaatatcatgtactgaaattaatagaagcaggaggcagagaaatcctaggcagacaggggcaggtccccagtgaaaccccaccttcaggccaaaaacagcctgaaatctgtggtccagagtgagaacttctattcctattcgcctgatctctcctgattggctcttcctgaataatgccttcgaaccaattgtatgttgccttttccaatactgcctaaggcccacccttcccccatccagtccctataaagaccccagactcagtcggtagaggggaaacagcctgacttcagggaggagatggcatgactttggggaagagacctcctgactttgggggaagacgacttgcccttcccgttccctctccagcttccctctcctctgagagctgttttcatcactcaatgaaattccccaccctccacatgtgccctaaaacttaaagtataataaaaaaaattctccaccctcaccatccttcaatcatcaagcatgaccttattattcttggatactggacaaaagctcgggactcactgagtgtgggtacccagaaaggctgtcacactggccctttgccattgctggtggagtgcagccaccccatgtgatgggaccaggggccaactgagctgctaacacactgccatccattggggtgtggacagtggaactgaaagaactaattagcacactaacaccccctttggggcttcaggctcacaggcacccttgcctgggcaacattgcattcatgcagtgttggccgtgggttctgcatggagcttgctcctgtgtcagcagagcagccaactagatcccacacttactccctcaaatgctccctcacacaagggcctgagcacagcaggccaagtagacggagtgcccctgctggaagtccagcaaaggggccgagaaaattcctgcatcaaagtttactgtaccaagcccagcaatggacacaggggacccagaggtaaatgacagtagttgttcttcctttctgaaggcagaacacctttatttatgaacacgtatccttattcccaacacagatatctgcataaatttagaaattcatgtgtcaccttagcctatccacagggaaatcaggaatttatggattttccctgattaaagaagcttgagtctggaggaagagacgatccactctcaaacagcaaacatttatttcccacagttctggtggatgggaagtccaaggtcaatgtgctggcaggcctcgtgtctagtgaggctcacttccttgtgtgcggatggccatcttctcactgtgtcctcacatggtgaagagcagagggagaaaacccatggctcctcctctcttatgaggactctagtcccatcaggagggttccatcctcatgacctagtcacctcccagtaccatcatgttggggattgggtttcaacttgggggacacaaacattcagttcatagaaagctgaatgaccactgaggtctctgaaagacaggaggccctaggtaggagtttatgaaatggaacagctgatttgctaggactctttaaatgattctccatgaatccagctgcttgtatcactcttcatctcacccagctctgtggtggaatgtggaagcaaagagaagttgccctggtccctagcttaactgctctttctccacccgaatacactgtgatggatgctttatttgtaaataattcagagcaagcctttggagttgggcaggacacagttcagaattcacctccctgacccctagtgtcttcctctgtaaagcgaaagctggcctcatacagttggtgtaaacatttaatggaggaatgcatttgtacagcacctagacagtggctggcacaaaatacaggcttaatgtaggcttgttgtttttgttgttcttgttgttgtttttgccacgactgctatttgacagtaaggtacaggccctggttctgggcatgaagaagttcactctatgccaactcttaccactgtttgatgatgctaatttttttcccaggcaccccactacattttccaggttgtaaatctgcctctcacccttgtagccagctgcctcttgaacaggaaccaattctctgcaatcaagcccatggagacagcaattccccatccccacatcagctgggtactcacagctttatcgctctccttggttagaattgaaatactttatagcattaatgcttttcagattgaaacctgcagggctggtttttcaatttcccccctgggactgtagcagaacttgtcttccagaagacagactcattgtgaggtctctgacaaggctctaaacccacctggctggctggaatagcaccttctggcacaaaggaacattcattgtctgggtattatttgtctatctgtggtcaatgggctatcagcaagaaagatacccaggaccactactgctaaaggggacagtggggattgggggactgatcacatttattgctcacaatgtaacaggcactgaactaagagctctgtcctcaagtgattctgggagccagggtaagaataaaactacatagtaacttactatggcaattgtggggtacaagtatttataatggcaacagccccttagctcgttctggtgtgttctgggtggatgtctgtgctgagaataagaaaattatcaccattcctcaaacaaacagcagttatggagactgaggaccagggagatcaaaataattcatcccaggttgcacagtaagtggcagagtctgggtgcaaccctaatctgatctgtgtggcacatttgggcaccttctgtctcactgccctgcattccatgtgtgcaaactctgctgtcagcctggattttctttctgactctacatctacataacatgtcttctttccatctcctcctcttcctttgtattgctgttttttaagcctgtgcctgtgggtagaaattgaatctgagctgaggccccacagaacttacattagtgttttttttttcaagatgccaggactctggttttgcctgagggctgagcttgttggagtttctggcacaggcctgcagggccttttccctgtctcactgcaaaacccagcaaaagttcttggggagctgttggtcagatcagcattagagatcactcgtgttgtggtgttattcatttttttaattgatacataatgattgtacatatttctgggcttcatgtgatcttttgatacaggcaaaagatcaaatatgtagggatcaaatcgtggtaattagatttccatcacttcaaacagttatcttgtttttctgttgggatggagatcacttttatgcattcgtgcatactatactatatactaaatgtagactgtatatatagtatgtagtatgtaaattgttgggactcagaaaataatacccaaaatgaagtagcagcctcagaagcagaagcttttctctggttttctcctgtcttcctgcctatcagtcccattttcccctgaggccaaccagagacactagaatccctctttcccaaggagagtcacaggagcagaaccccttttcctgaaagccagctgtaaaacctaaaaatattctatgtaaaaatagaccataaataaatgatctaactgccttgtttgactatgggtcataagaccctcattccagagagggtcctgtcccacatccagaggaaaggaatgaatgctcagagaaggctggaagaatctagacaggccagccttgctgggttttcctaagcagtctattagcattagatcataccctttttagccaatcatatttctacacagctgtccatattttgttgaacttaagtataaagatggacaattttccctgtatgtttgggtcttcattctaaaggctcctgtgttacacattaaataaatttgtatgtcttttctcctcttcaccaatctgctttatgtgtgtgatttctcaggaaacctgtacggggccaaggaccttggccccacaatatgtatactatgtattatgtatgtagtatgtatacctatatatacatatgtggtatacaaagatacactatatcctatactgtatgtgtactatgccataccactttagacgaggaagaaagggaactaatgtttcctaggctctcaatatgcaccaggcacttgactctttatcacactcaatcctaaaacctgtctcttgaggaaagcggggaggcttgggcttcctatcagtgaggcggagactcaaatcccagcttggccacttactggctgtgtggtcttgttgaaattatataacatgttcttcatttgaaaaccggatacttcccaaagaatgagtttgttggccaagtgtgggggcggattaaaagctataaggcatggaaaagtgtttagcgtggtacctggcacacagcaagtgcttaataagtggaaacgactgttatttgtgcctactgcagatgaagagggtacacacaagtcacatattcacggccatctgactcaaatgtagtgaaatggttcaaactcctgacacattataccagatgatgctttttgttgaataacttctaaaactttgtgtctagtaagtttaaactgcatagggattgaaaatctttcagaaaatgacactaagaattcaactactttttttttttaaatcatacaatgaactccctttgtaatgggctacactctagaggatgggtggtcacaaggaaagcacttgcaataaggtaagagctatttctttcctaactaataacttttcacaccccagattgccattaaaacccccaaaggcagggagactgctgctcaactgagcagagaattagcttgttctagcttttggccaagttgcagatccatatgtggcggggcaggtttggagtggatataattcattttcagaaaatcagaccaatctctcttttcattatcccagttctacttctctaattctagtcattttctctctgtggaattgtaccacactgagaaggggaaggaaagagagaagagattcaccaagatgcactgaatgtcttttaggtttaattcctcttccacagtttagtctctctgttttttttttttttttgagacagagtctcactctgtccctcaggctggagtgcagtggtgcaatcatgactcactgcagcctccaactcctgggctcaagtgatcctcccacctcagcctcccaagtagctgagactacaggcatatgctagcatgcctggctaatttaaattttattattatttttttttgtagagacagggttttgctatgttgccaaggctggttttcaactcctgggctcaagcaatcctcctttctcagcctcccaaagtgttgggatgtacagtcttgagccaccatgtcttacccataggtttagtcttctcgaccttcctgggaagtatgcagcattatcttcatatcacagttttaaaaactaaagctcagagaggtaaagttactgacattttaaatgtcacccagacagtaagtggcatgggcaagataaaaatggtaggctctctggctcccaagctcatatttcttcccctgcatcaggagttaggaaatctgctcccaactctggctgtgacattaatttgttatttcagaatcgcttttctctcatgccccatttttattcaaaatgatgggtcaaggaaatttgggtgaggtcagatatggctaatggatttcacccaaaggccaactttgatcaattggtagcagctgcttggagctatgggttgaatgagagtctgaggtcatgtctaggctcattaggaaagagtgctgtgattgatttgtgatgtctgccttgggcatagatatggatgactggaatggttcactgaagtgctgtgattgttgtggttgtcaccacagctcatttcaagatggctgctccacctcagcctgccatctctatttttaagcaagagaaaaaagaaggaaggagaaagggggaaaggagcatatctgcatctggaaagcaaaacattttccagaaattcctagcaaacttcttttatatcccattgaccaaaattgtatgacatagcaacaccttgttaaatgggagtttggagacatacacactttaattgggctcatttctgccactcaaaatgactagaattctgctagtaaagaaatggagtctgaatattgtgcaggaaaccagcagtgtctgcaacatgtaccatccctagactgaatatctttatggtcagttccagccaagtcagccataggataattcagcaaatttacttcttttcgggtacaatgatgaatttttcaatgactgtgcagtccctggttcatgagggatccttaacaggtatttggtgtgagggaacccaggccaatgcaacagtccctagtagtttaatccaggaggacagagtatccaaaagagacatatcctgaagagcaatgctcagaaagccatggagtgacctgagcatactgtgcaaggcttggaagcgatcccatccgggcttgggagagacaggagagggataacatggagagttctgaagaacagggagggttaactttgtttgccaagtgagactccatgatggtcagagctggctgggaggctactgcagcctcctcacattacaaattgggaaacagagttccagtgagacaaagagagctgtttcaagttgcatggcaagttcactacaaaaccagagtagaacccatattctgactcccaggcacagaggatgcagcagtacactgggactcagcatctgccttcatgggctgacactctgggagtatgagtggtaagatactaaagctgattaacatgaagtatttcttgacagctggaagaattatgtgaatgaagagtacgtgagcaaataacaggagatctgtaggtgcgaaacgaatgaaaggataaagtttgagctgagatctaaaatctgtgtgggagttaagcaggtatctacagcagggtcccatagtgtgcatctgtgtgtggtgagtgatgtgcgtgtgtaatgtgcatgtgtatgtgctgtgtgagcacatgtgcatgtttgtggtatgtgtgtgtggtgagaaagtgtccctggcagagggaactgagtctgtatgatgctgcaattctttgtccacctcctcctgacagtgagtctcatgtaagctcagctcttccactctctgtgctgtccttggggctctgaccttcagtgattcctatagggttggtgttatagactgaatgtcagactggacgctgtggctcacacctgtaatcccagcactttgggaggccgaggagggtggatcacctgaggtcaggagttcgagaccagcttgactgacatgacgaaacaccgtatctactaaaagtataaaaattagccgggtgtggtggtgcacacctgtagttccaactacttgggaggctgaggcaggagaatagcttgaaccagggaggcggaggttgcggtgagtcaagatcatgccactacactccagcttatgtgacacagcaagactctgtctcaaaaaaaaaaaaaaaaaaaaatagactgaatgtctgtgtccctgcctaaattcatatgttgaaatcctaaccctcaaggttattggtattaggaggtggggcctttgggaggtgagtaggtcctgagggtgaaaccctcataattgggatagccccttataaaagagacctcagggaacttcttcatcctgtctgccatgtaaggttacagcaaaaaaatggcagcctatgagccaggaagcaggctttcaccagacaccaactctgctggcatcttggtcttggtttccagcctctagaatgattggttgtttataagccaccagtctgtggtattctgtttcaggagtccgaacagactagatggtaaggttgccagataaaatacaggatgcagagttacatttgaaattcagatagacaactgctacagggctgctggccttgggcctggaactcctcgctgtcacccacacctggccctctgtgaatcgaggccaaaggagggaagcaggggcaagcaaacacacaaaggccggggggtccagtgtggtgctgagtgagttcctggtctggactcggaggcctgagctctaccgtggctttttcacaccctcgctctgtgactttaggcagagcacctagctgggcttcgggcttcgtgatagaatttgagttttcggatactctctactttattcgttagcacaggaatgccatttttataaataataataataacaatggccattgccactggcttagtgtggcccttacatctttcgctgggtgacctcccatctccagcctcgctccctccatcctgagcaccgtgtgaccctgtgtctccccttccgagccctgcgatggcttcccattaccaccaagccgatgtctgcctcttgggcatggcatccacagcccatgtaagctggcaccaagccaatgtctgcctcttgggcatggcatccacagcccatgtaagctggcgcccgctgatccccttagggtcaccatcttcaccacctattcattttctatcctgtaattcctgaattccctgagcttctcagaatgaatggcacttctgcccctctgggcttttgcctgcatcctatctgcctgaatcgttaaatgaatgaatgaatggggaaaaagagcatgtgtataagccataatggcttccaaaactattatcaccagccttcatcacagaataatttaattggttcctcatgatgggtcatgatgaaggcagccaggagtatcttgggattctggtgtgaagttgcagggacttcttttggggcttaatatgattgatgtgatacaagccctggaaatgaggctgccaaggaaagtccccacctccctcccagcccaccaacccaccatgacacatctgtttgaacaactgggctgcagactgagctcaagcaaaagtcatgtgggaacctggttctagtgcacagagaggtttgacaaattgccatttggacacctgaattcagcctgctgtgcggtaactgaagggatgcttcctggcttcctatctttgactagaaaatgaatgtccaggttaattataagctggaaaaaagattacctgatgcataatgtcctttgtgatgttattaaaagtcctcccaggtagcaggtgtgcggttattatcgtaacaagacaatggggtggcaccaagtgcttctctccttcctcaaagtggaccttgatgacacctcttgcaggaagccttcagtgattacctcttgacttcccattgccctgcactgactcagctcagccctgctgactctcatttccttatttccacgatgggctgtgtgtcaatgtggcccttctcaggatagcactatcaatgaccttactcgtgggccttccgctgggaaataggaggaggctgtgtgtcctcaatgtccccttggtatcactgctgattcactgagctaccttgtgaggggatgcactcatctcaagcccatctcctcttttctaaaatggaggtgagttgctcctgtctgagatctcagggggaattgaaaagagtttggagatcctctgtgaatacttataaaaaaagctcttgcttcaaaactagaagcatgagtgtaaaaaagaaaaatatggatgctgaacacactggaaccaatacatccaaaagaacacagtccttgtcaaagtcgtgcctgtaccagccacacctcatcccctgcccttgcttgcttaccaggctttgagaaacaccttttagctagtttatcagcagataggcaaaaaaacaattttgtgccttggattcatacctttaaaaaaaccctcaaatcccattatccattggatgatttggcccagaaagactgtttctgaaaatcaaattcacctcctggggataaacacttgtcaccactgagataattcaagagcttatctccccataaatttattctcctccctcaacaggcggcctgatatcatagaaggagttttagaatcagaccagaattctgacttcttcacttctctactgggtagcattgggcaagtgactcaacctctctgagcctcgacgtcctctccaagataagatgggaaagagtaactaaacgcacagggtattgatgcacgttaagtgagataatgtctagactgcatagtggatactcatgaagtattagtctctctcttcttcccttcctctgaatctcaccaagctggcccctactgggtagcaataggggcagggcgcctagggtattctaacttatgctatgtttaagtcatcttgtccttattttgctcatccccctcctggcatcttaagtgcagggccttactcatgtctgtatcccttacagtgctagtgtggtgcttggcacatagtaggtgctcaaaaaatctgtttcattgagtcaaatatgtcataggggcccagaccacttttaatagaagaataagccatgcaggacggccatgcaatcagaaggatgccattccagggtaataagtaactattggcagtcattttgtaaacacatttggcttcccagggtgtctgctttgaacctcttagaattctgttaagttctgttgttccttaaaaaaaagattaactctgcctggggtgcagttcttcagctgccctccagatggcggtgttcaacacagatttatctcaaccgctcaagcccctgggaactcaacacaagaaaaaaaaaatctctgttttattatcaatgcattaagaatgaatttatcatcccggctcagcaaaagtctagttattctgtaagaagctttatccctagctaacgtgcagcttaatcagttcagttagatacaaagccagctagggcttttgtcccgtgttcagaatgaataacctagtgctctcagaagtttcagctttcctggcagacaaacctaagaaacttagtttctctccgggatccttgggctgggggttgtggggaaagtgtgggagaaataatatatgcagaaagttctatatcctgaagtgagggggagggatgatggattatcccgcaaaggggttttagtgggataataataacaacagcaaaacaacagcagcagcaactaaggttcactggatgtttaccgcatgccaagcaccactcaaatgcctgactattccaactcatttaatcttcgcacaaccctatgtggcagggactcttgctatcatagttttatggatgatgaaattgaaatctagagagtgagtgaattggacattgtcccatacctagtgggtgacagaagtagcatttagacccaggtctggctacagaagcctttttttttttttttttttttgagacagagtctcactgtgttgcccaggcttgagtgcagtggcatgatcttagctcactccaacttccacctcccaggctcaagcaattctccttcctcagccttctgagtagctgggaacacaggtgcccgccaccatgcctgcctaatttttgtatttttggtagagacggggttttgctatgttgcccaggctggtcttgaactcctgacctcaagtgatcctcctgccttggcttcccaaagtgctgggattacaggggtcagccaccacacctggcctggaagctatggtcttaactgccaggctatgctgcctcccctgggtggcagaccacaagtgggctgaggatatatactccatacttctgaacatcttgaaccaccaatgcccaccccattgtagccacagtgttccctagcccacaagcaagagcaagaagtagaaaagcccagtgcaaacccatccctgtcttggggaaacagtgcaaagcacacactacacctactccaggtgtaataatataggttgttggaagaacacccaagttttacagccaaagggacctgagtttgaatccctatccagtcaatttcttggatgagttacttaacaccctagaatctcaaatagtaggtgcagtccaaaggtgggaaaatccggcagttgcaaactctcaggaatcagcagttatgtggcgggcactgtccccagaacccaggtaccaggagtcagctcaggttctgctcccaggcagtggaggactctgagcagggaaggcgggagggcccttcagggagcaagacctggtctgccagggtggtcattgacttaacagtgaagtgcttttgtgtcactcagcctagatatgactcttgggctcttctctttatcagccatatgacccaggccaagttgtttagctgctctgagcctcagttctctcatccataaaatggatgtgataagttaatgtgtgtgaacagcttggcacagggccgggctcaggccatgtgaggatcgggggtaatgagcatgcagaggcatgatgatgaatcgtatcctgaaaggaaactcaaggcatacagagggtcgccatcactgggttggtgtggagggggatgggggtggttcccttatcctaaacctttctcccagccctgcttcccaaagtgcccgcgtttaatgtttgctaacagccacgcagcttaatcttcactgcctgctgctttcctgttagaaatgaccaaagctttgcccctgtggccactggaccatgctaaagagcccgagacgcctctccacagcatttctgagtggctggctacgtgtctttttgttttgctcaggtgtctgtgtgtgcatttcttggaattgctttctggaacactaagatcaatattgtctctaacattggtcttgagagatgctggggacagcgcaggatgatggagtgggtgggattgggaggcagacatagaggggtgaggtagggtgaacagtcacttccatcgagcccattcaccaaaagtggatccttgccaccagtgttgtagtaacagtaatgcatttggacatgatagtcatgaaaaccatgatggaaaggctttcaaggacacagagcgaacacaggagtcagccctgctccacatagaattaaagcatctgaagtcagctgtgagacaaatggagaaggtggcccttgaatactgctcctttcccccaccgctgacagtctttgctgtccccacctccccttcctgatttcccagtctcccacataggagcaaggggctttccatggacccagccttaaagacataataaggcatccttgattcttcctttaccttcctataacaccctgttcgtcagaaattccttttgactccacttgtagatataacttgagtgcctcccatttcttcttctctggcccagctcaagccaccggtggctctcttatagatttctgtaggaacctcccctgcatggtctccctgcctccaatctggcctcttgcaatgcattctcccacagcaggcagactggcttttatatattccagatagaagttctttgtctgatcggtggtttgcagatattttctcccagtctgaagcttatcttttcaaccagggtcttttgtagagcaaacatttttaattttaatgaagtccaatttatacattttttcttttacagataatacttttgtgtatgtccaaaaactctgcctagccctcagtcctggggcctttatcttatttttttcccctataagcttcaaagtttaacatttttacatttacatctgtggtcctctttgaattagtttttgtaaagtataaggtttagattgaagttccttttttttttttttgcccattgctcaatttccatttgttaaaaagattatcctttctgcattgtagagtgatcttttaaaaatataagctggccaggcatggtggctcacacctgtaattccagcactttgggaggccgaggcagactctttgagctcaggagttggagaccagcctggccaacatagcgaaaccttgtctctactaaaaaacacaaaaaattagctgggcttggcggcatatgcctgtggtcccagctacttgggaggcttaggtgagagggttgcctgagcctgggaagtcgaggctgcactgagctgagatcataccactgcactcagcctgggtgacaaagcaaggccctgccactcccactactcccccaccaaaagaaataaaaatatgagctgatcatggacctcctttgcttaaaacccttcagtgccttcctacatgctgagaagaacatccaaacaagcctattctcaggctccggccagcccccctgaccttatctcctcctctccgtcccacttgttctagctacagaggtctccttgctctccttagaacacccaaaacttcctcgcctcagaatttttgcacctgctgttctctctgcctggaaggctcctgggcttctcccatggctggtcccttcttatccatcagacccaagagcaaatgtcccctcagcagattcctaagcaccctgcttacattactccttttcaccccatcactttccatcaccacactgtgcagtttccttcttggcacccatggctagcagaaatgatctcacttacctgcttaccagttgattgttcaccttcacctgaatctaagctatgcagaggcaaggcactaaccatctccttcaccgttgtggttaatagctcatgctctggaatcagacagcctaggttcaaatcatccctttgacacttactaatcctggtgagatcttggccatgtaacataacctctccatgcctcagtggcatcctctgtaaaatggagatagtgattgcacttacatcattggtcctaacagggactaaaggaattcatgcatgtaaattcagtagagtgtctggcatatgttagatgctcaaagcatttgcgatattaggactactgttgttggtgaataaatgagcattggcagtggcctttaaactgcactgcagagcagagctccagggttgcctgccacatggtagatgaacacttaggtggtgtctgggccacccatccctaccttaatcagactggctctcctgtcatctgtctatattttggatttccatgtttgttttcagaataggatattgctgctaatataagtttgaaaaaacatgaatgaaggggaatggactttcccatggaaacccctggattcttagtcccaactccagttgtaatttttggcaaatcatgtgcccactttagacctcagttatccacctgatgaaatttagctggatagtcagcaaggtctcttccatttaggatgctccatttatcatgttccattattctaagtgaggaaccgactttctacgccataccgtctccagagatgcccttggcaggaacttggcagcgactctttacctgagagcccagagcaccaaaggtacagctctgcctgtgggtggaatatggtgcaaccaagctcaggggggcctggagtctggcattaggagactgaagttttgtgaggttggggggtcattgagcactctaagtgctgtgaagttagggagccctggaatcagccctggctccaccactcattaggttaaaggccttgggccaggtatctcatcatacccagtcctgttttttcatctgaaaaattaatatgtatatatgggtttgatgagggcattcagggagataatacatgggtagttctggcaatgcctggcatgtacgcggaaatacaaactcttaaacttactgaaatagagtctttagaggagaagcctaggaatttgcattttgaacaatctccctacccctcctccctcaagtgaatgtgatggtgaaccaagcttcagaaacactaatctatttcatgaccattgctacctcctaggcaatgctgttcaatagaaatattctctgagctacatatgtaatttaaattttccagaagcccaaattaaaaaggaaagagatgtaaaaagatgaaatgaattttagtaatatatttaatttaatgcaatacatcattgcaacaaaattataattttgtcatgtaatctgtatcaaaaaattactaatgaagatattttacatttttttcatacttagtccaaaatctggtttgtattttatacctatagcacttcttgattcccatgaaccacatgtccagtgctcaagagccacatgtagctgagagctgttttgtgcagtgcaggtctagagactgccccagaaagctggggtcagacatgcagcccagacagtagtgaagtgtgcaggaccttatgacatgccttttggggaacaattttacccgtactttatcattttttttccttgcctttgtccccttgaaacaagctcactaacagcagattctacatatattgtgtctgattagtgctttgcatgttgttatgagctgaatcacattcccccaaaaattcctatgttgaagtcctaactcccagggcttcagaatattactatatttggagatagggtctttaagaagtaatcaaggttaaaaaaaaaatgagggcattagggtggacctaatccaatatgactggtgtccttataggaagaggagattagggtacagacacacaaggaaggaaaatgatgtgaagatgaagaaagaagatggccatctacaagccaagaagagaggccccaggagaaaccaaccctgccgacaccttgaattcagatttccagcctctggaactgtgaggaaatcaatttctgtagtttaagccactcagtctgtattacttggttatggcagccctagcaatctcatttgcattctgtttgcatcatctctgcaatgcagttacaacaactccattttatagatgaagacactgaggcttagagaggttacataatcttcccaagtcatggctggaatgtggctgaaccaggattcaaattcaggtctaccttcaccttgctgttgagccaatgcccttactcctaaccactaatgcctatatttttcatccactttccttcccaacaattttttaatagtaatctttttgtgaatcacagatgtgggttctagtcacatgtgattttgaaagtggtacttgagtcatcaatattctcacttatgaaatgaaatggtcaaatggtccaatggtcaaacggttgctgaaagtcctttcaaattactgttctatgagaaattccaaattgcaggggccagagagaatgatgactccaacatagcacagaccttcaggaagatggcaagaccaggggaggcagaagattttgctactaaagcaagtgcattcaaactaccacataggatcccttgaactggaatctgcgtcggctgcttcagagaccagcacaggtttactgctatctgctaagtgctgctgcaatgtcattactatgttccattctcccagtgtggaaactgagtctcagggagagtttaaggagcttggcaagctcacgcagctggaagtaagagaagaggctggggtttggacacaagcctttcagctttctcatctgtgccccccccttgatcatgttggcataaaccaggcagagtaacaggctgtgggcaaacttgtttgactaactggcaggttcaagggccataaatgtgaccctgaaatagaaggtgagccctgagttaccctttctggtaatggacagggacccagcacactaggtgatatctcagacctcttccctctgggattccaagatagagcaggtagaggagtgggaagggtgaccttgagctccaagtacaagtcgagattcccagacttcttgatgtcaagaagtagtaaatgatgaattaaaaaaaagaaaaactgaaggtggcattggggaccaactttttattttgcccttaaaaacttactatctgctatcaccattattttacatataaaggacatttttaatacccacctaattaaaaatattttaatcttagagtaaagaatggctttttaaatttaataaatttcattttatgaaaattcactactctttccttatttttccctttttactgcagtcaaaggaaatcttcattactcactgtcagcaattcatgagactcctggcccctggccaccccatcatgtgtcctaagccctgggtcattttgctgtagaggcagtgaaagtcagggttgggaagcaggcagtgttgatggcttatctctcttgggtactacaagtcacccctcaggttcagctgaaaatcgaagaaaaatagacaaagggcattttgcatgaagagtctgagtcagtgagaagggtgagctgcagtacatcatcaaaggtgggctaattttattcctctcaagcacatactttcatactgtgatacaaactaatttagcaaagaattgctaattagatgtctttgggaaatcaagcttcttggatggatgagactgatttacagatactcttctcattgcatacctgctaatgggtacttccaaagtacttgtggggagtccaggagagaaggggcctatggtacaggagcacagtacggctctcacagcgtgctcacaaaaggcagtttctccttttaaacacttgctatctcccattgcaacaattatttccaaagttgcctgaatgaaaggtgaactgcattctgcaaggccccagaggtcccagagctattactacctttttggaggcagtctttgttactggataaagtggtatctgtggctgtagaggctccacctgctgaagaaggtgtgtaacctgggaccagacctgtattcacacattccccaggagggaagatggaatatctagtgttcccttcagagcagagctgataggagaatattcagatgtaataaaaggataaattagagcgtgaagccatatgttaccaaaggatccaatacacttattgggtctcaggaaaaggagaagaaaatacatatttttgagcctctagaaggtatcatgttctctaacaggtgccaaggaatgaaagaaaaattgagcaaaggtgtagccctcaaaatatgtcccagcagcatgtaggggagggtgacaagtaaaacagtggcaaggttcactgttgtatcagtagtttctgcacagtgtttgtgacaatacaagaggagctccactgagcacctgggaggtaggtgtgtgatatggtttgggtctgtgtgcccatccaaatcgcatgttcaattgtaatcctcagtgttggaggtggggcctggtaggaggtgattggattatgggggtggatttttcattagtggtttaggaccaaacccttgatgctattctcctgatagtgagttctcacaagatctggttgtttaaaagtaaaactccaaaccataaaaaccctagaagaaaacgtaggcaatactattcaggacataggcatgggcaaagacttcatgacaaaaacaccaaaagcaattgcaacaaaagccaaaattgacaaatgggatctaattaaactaaagagcttctgcacagcaaaagaaactatcatcagagtgaacaggcaacctacagaatgggacaaaattttgcaatctacccatctgacaaaggtctaattatccagaatttaaaaggaacataaacatatttacaagaaaaaaaaaccccattaaaagtgggcaaagaatatgaacagacacttctcaaaagaagacatttacatggccaacaaacatgaaaaaaagctcaacatcactcatcatcagagaaatgcaaatcaaaaccacaatgagataccatctcatgccgacagaatggtgattattaaaaagtcaggaaaaaatagatgctggagagatggtggagaaataggaatgcttttacactgttggtgggaatgtaaattagttcaaccagagtggaagacagtatggcgattcctcaaggatctagaaccagaaataccatttgacccagcaatctcattactggttatataccttaaggaatataaatcgttctactataaagactcatggacgcatatgttcattgcaacactttacaatagcaaagacttggaaccaacccaaatacccatcgacgatagattggataaagacaatgtggtacatatacaccatggattactatgcagccataaaaaggaatgagatcatgtcctttgcagggacatggatgaaaccggaagccatcatcctcagcaaactaacacaggaacagaaaaccaaacattgcatgttctcactcataagtgggaagtgaacattgagaacgcatagatgtagagaggggaacaacacacaccagggcctgttgggggggttgggaattgaggggagagaacttagatgatggatcaataggtgcagcaaaccaccatgacacacgtatacctatgtaacaaacttgcacattctgcacatgtatcccatttatttttttgaagaaataaagaaaaaaagtgtgtaacaccttcccatctctggctgctcttgcagtgtaagacatgcctgccccgttcagcttctgccatgattataacctttctgaggccttcccagaagtcaaactgatgccagcatcatgcttcctgtacagcctgtggaatggtgagccaattaaacctattttctttataaattacccaatctcaggtatttctttatagcattgtgagaatggattaatacaagatatctcacaggagaaggaacatttaataatgattgacatttgctgattcctcactgtggtccagacatcctgataagcacttttataaacattgttttcctcaattctcccaacaacaaactacaatccccattttatagacaaggaaacaggctttatttgtgagatttagcagagaatcatggtcacacacacacacacacacacacacacacacacacacacgtgcagcatttcagctgctatggggatccctaacttgtatgggctccccctctgaagcccttggaaaaccctagcactgatgttgtatattttgataacatttgcaagctattttactggcaatcagtattgtctttttccaccatgacttctcttctgtcataatttcctttgtgtgtgtgtgtattgagtgatttgagaagtcttggcatctggctaaggttgtgttttagatacatttgttttgggttgaataggatatgtttatatggattttggtcacttctgtgcgtagttaaatgattgctgactattctggtgtaggagtggcttccaggaatactcccaccacctagcactgcagttcactgggtgtggtgatgtcaagtccagggcccaggtcatggagttatatgaataagtcctatagcatctagtgcagaatgacgtgggtcatagaggagaaacaaagtgggaaatgtactgagccagaagctctgtatggaaaattcttccaatgatgagacatggaaagttgtataatgaagacatttttcattgatgcctaatcaaaatagaagtttccttttttcagcaacgtataatactaatgtgggcattaatatgtttgtactatacatttattttacttttcaaatggcattttgcaagatagaattcatgaaaattcttgaatttgtaagacctggacacatagcagtataataaaaaatggttacatctgtgcttgatgcatcccaactctcaataatatatttttttgaccaactatgctagacaaaagactgagtcatatttctattcactctctagaaaattgttatcacaaaattgttttcctatgaagaagcaatctcagaatatgccacccaaaaacatagaaaaaatgtattatagaggtgggtcaagcagctaattaataaaaatattcttatttttctagatattgtgtttgcagtattggttagctattttaaaatttgcagcctcttgtgatattttctcattctcactttcatttacacttaattttgtatattttatgagccaattccagtctgttcatgatctttgcttcctgactccagccctacagactttagctttccttaggcagcccccatagttgcataagctgatttattataataaatcacacacatacacacacacacatctcagatatacattacatctatcatctctatcatctcttattgggttctgcttctctgattgagctctgactgataaagatgatgatgacgatctaacaacaataacaatattagaatctcatactgattgagaatttatcatgtaccagacatgatgcttaacacttttcaggcattagtcttacttactctgctcaactccattaggcagatgctatattatccctttctatgggtgaaaaaaacagaggcacagagaggctgagcaagtgatcatatagccagtcagcctcagccagaattgcaacccatgtctccctggcctgtgccctggactagcccagggtgtagcatgagtgacagcactggatgggacccctcatgctacgtgagggaaacacaagcagattccaccctttggctgctcaaagtcaggagtcacgaacaatgagatggaagaagccatgaggatttatgtcaaagtcatagtcactctgtgtggaagccttcttgtgggtgaggtaggcaggcaagaatcctcataaacagaacagagaacatagcatgtcagagaaggaaggcactctgagatcggctagttcatctgccatgggaaatatgagcaaattgaagccctgcagagatatggagaagcatcagggtgtaaataggctatcaggttggtaatgccacatggtatagattccttttgctgtagaagtctcgccatgaccctggaccccattgggcaggggaactggattccaacaaggtctgccctccaaaaaattcagtacagtagccaagggttagtatgaaatttgagggagagacaaatttgacacattaatatttgacatttcacaggcaggaagtagtgagtccccaaacctgtatataacaacatagttactgcaaggctgaggaggtggcctttggctccagatgtgttgttgattatgccaatggcaaagaaagcatggtggctttcatgcaaataatggtaatattgagaatggaaataataatagtactaataatcatttatttctttaaagtgctataatagttcataaatggctttttacatattttcatgtttttatttattttattttattttaagacaagatctcactccctcacccaggctggaatgcagtggcacaatctcagctcactgcagcctccaactcctgggctcaggcgatcctcccaccttagcctcccgagtagctgggactgtagttgtgcaccaccatgcctggctcatttttttgtattttctgtagagacggggtctcgtcacgttgcccaggtttgtctcgaatttctgggttcaagtgatccacctgcttggcctcccaaagtgctgtcattacaggcatgagccaccacgcctggcctatttacatgtttaataggatgttgtctgtcactactattattcccattacacaaatgagagtattgaggtccactaagcaattggtcctaggtaacccagtgggtagtggtggagctggtcttggccttcaggtcccacttaactccattctccactgttcagtgccacctgctacttccaagggctgggaacatgtctctggacaatgaccaggcaagggtgatagtcccccattccctccactcccggcttctctttttctttgtgaacaatagaatatgtagctatttctcattgggggtggtggaggggggaggtgaggagcagctggagaaccggctgacttccaggctgagagatgatgatgagtttgcaccagtggcggtcaaaatacagagattaattacactcaacccaagaagtgggtatttatgggctgtcagtcagaagaaaatattttgaagccaaaatttgaaaactgtcacaactggtgttctgaattcgtagatatcttgggtgccttgtaatgccttctatttttcatttagaaaaaagaaaatacctgtctttgaaaatcacagtggcttatgaagtggtcagactgagtttcagttttgagctctctaggtgccgtgggccgagtggctggcatgtaacacattcaggcagagatgctccatgaggaacttcttaaaatatggtgcagagaacataggctcaagagcttgacttgaggtcctctcctttccagccctgagacctttggcaaattcatctccatgcacttgttttcttcacctgtaaaatgggatccagatcaacaccctctccaaatggccaaggggattaagtgagattcattcatccactgcccagaacaggactttgactaatgttttagtcctacctgtagcatttgaagtaattaacaaaatgcttttcaaacagtacctgttagataaccctgtgtggaaagaatgaatgaaaaataaggggagcctttaactgaaatgttgaggctgcttccctaacattgaccctaaaatctgtctagtctagcctgttttacactttttgctgggtaagaaatatctatagtaattcataggttttctaataaatagccatgcacatataacatttgtttataggtgtaaaaatgacaaatacttgcagagcactttccaaaacttaatctgtgttattttatcttatcctcacaataatgcaatgagctgcagatactagcactgctgctgctgctacttctgctaaacatttgcactaactggggatctgctgtgggccaacctctgtacttactaagtgctgtgtgtacttcatttacggtgaattcctcagcgcaggctatcaacagcatttttcagagccaagaatcaaactcaagccaatctgagaccatagccattgttgcaaagcaagggttattgtctcattatgtagatgaggaaacacactaaaaggagttgcaagacttgcttcaaatgtcctatcttgtaggaggtaggatctggagccaaatccatgtattcttgcttcagattgtaagcttctaccatgtgcctgtttctcaacctggtgatggtgaaaagaaggacgtggtcagtctgctttcattgaatgcttctatctaccaagtccgtgccaaacagctaataatatacttcgtcatttgatctacccaaacacaatgatatacatgttcacagaaagatgcttgagggttcagtctccggaatgttaatggctattatctccaggtggtatggtaggatttcagacgatgatggtgacgatgattttcttcatcattttacatgtggtttttgaaaacagagacagtaaaacttaagagcacacactctaactgccttttcttggaggtgttatttatcctgactttctggctgaggaaaattaggctaagagagagacagtgaatggtctattcaaaattaacttgcaaagctctagctcacccattccactgagctgcctcctaggagccccaatttgcaggacaaaagtgcagtgtcctgagtgactttatagtctcctccatgacagagggcatggtttcttgggccctaaatttgtacctagattcacatggtagtggggcctcaggctttcccacaaggacaggctgaacaggtcaaggggctacttcctaaatgctgggctgcagctgatcgggtgtgttgtgtgttacaaaggcccctcagggtgtaaaatgcccttcctgacctcacattcttcatcagtcattgcctgggaagatggaggtggtgatgctgcagagagggcctgggaaccattggtgaatgggtgagcatgtagtatggatgaattgtgggtcaggggtgatgcacatctcatttcaaacactgtagtgtgggggttgtagagaaggaggtatgtgactacctgttagacctgttcttttgttttggaaatttgatgctatgtccaaaattcaaaaatttagatgactcagtagaaagttcatggtgaaaaatgacatcttccaggtaatattgggtgagccctccgaggccattaaattccagccttgtccacagagacaaacaagccttctatcacagtcaccaccagacctgttgatatagcatatttattaaaacataaaatcagctcattgccttacagccttttatgatcgagatcaaaatgaccagcagcaggtagcacagtttagtagagaaaacaccaggactggggcctggttctagtccttagctctgtctctaacaagcagtatatctttgaataagacacttgggccctctgagaccccttatctgtaagataagaaaatgagccacattatctgaatgacctataaatacaatggaattcaattcaagtctgcatttattaggcatccacttgtgtccagcactgtatcatggtaatcagagcaaagctggagattgtaggagcttgattctgtgataccacaatgaacttctctacattacagagaaaccatgaagactgtctgtactgaatggtttgtgcaatgctcagatgttcctttaggtctgaggcacctattccctcagttaaggaagtgttctcaccaacactactcatcctacaccatgactggttgatgctagggtccaaaggcccagcccttcccttggattaggaacatctttgaaaatctccttcaactccagagtcctgcatgggaaagttgaggtctaactgcattgcagtttaacttctctctttgccccatcctttttgccttactccttcacagaagcccttgttcctgagagcatgcccctccaaccttgccatgtgcaagtctctcagagtctatttcctggaggaactcaaacattgacatgaaatctcatggcctttggaaaaaaggggtccctccagtgtcaaccttcccctactcccatcccttctgtccactgagcccatatccactcagagtggttctgagcatacctgttgcccatcccagttcctgggatacagacacagaaataccttctgtggtttcaggggagtaatgtgatgatccatgcattgatagatatctctcataaatatggcccaggggccctgttaatctttagttttgaaagggaaactaagaaagcctaagttcttgctttcttgatatcaaagacctgcaatcagtagcacttcaatgggagcaaactccctggggccagaacttatccaggtagctggaagaccaactcttccccttgaagttaaacaacaacaaaaaaagaggtctgagttgagcacatggcagaaattcatgaatacttgttgaatctgggagaattccagtagattatcaacactgttaagatgaggctttgtgagaggttgactgcatatgcctttactgtaaatctccatgactgtgagggcattttccacttaataggccaagtgccacaatcacagtggcttcttcttgcccttggtttagaaaaccataattgtgtcggaggacagactcccccaccttccttgtagaccaccaatgtgtttagtacatactttgagaaaattctcagttgagttcaaggctctgtgctccctgggaaacatggaatacacaccagagtgccacagaatggaaaacacataatgctaagcacatctgggtcagatcccaaatctagtatctgccagtttgtgtccttgaacaagtcattttgctcctcaggattcttgtttgcttattgataaaaataaggctaattcttaacttccaaggattttgttggaattagaaataatattacatgcttaatagcaggttggatctcaaagctagttattattagtagtaataataatacctagataatactgatattacaaaggaaatgaacattagctagcctgtataatgtaaaggctaaaactgtagtgaacactgactctatatcatggtcaactttaaatattatgtaacaacagacactcacacatacatttccaagatccatctgatacttgaaaatgatgctgccagaaacgctctttccctttagtcattggccttcactcatagcctggcctatgcttgccttgaatgacaagtatgaagtgagggaaaaaggtatttctgccatacagagaaacttggggctggtaggagattaagggatgggaaccctgagctccaggcttggctcactcatgtactaaaggtgtgatcttgtgcaaatcatttaatctattgagtctcagtttcctccttcatttatttattcattcaaccaacatttattatacatagagactcaagtatggtgtctcccttatgcaagaaccatgcagtaggtgagctggaagtaagcaaagtggaaatgctgacatgttcagtgcatgttatggggcatgcagatccaggtgagagccatgagagtggagccttttctctctcactcagtgccatagtttcacccctgacgcagtgcccagtacatcaatatgttcaacaaacaaatgaagatgaaattctgctgcatagatcagggaaagttttagagtgaaggtaacacttgagctgggtcttacatgatgagcaagaagaggttagaaagagacagtaggagtggaccctccaggcagaagtagagctgtgcaaagtcctggagctgagacaaacctctgagatgtcagggaaacgtctggcatgactagcgaggagtgtgcacagggaagaatgaaatcccttggcggcactgtgagaatgaaatgagttagtaatgcagaatggctgggggaaataggttaggcggtattattgcatcctgctaccttgatgtataaatgttatatatttatcttataattgttgttgtcattactttagatttcagtctaattttgttggtccatgattgatcattagtaaataaatatgcatgttgatgtgaagcttggctctgtgtacagcattattgatgggttcattcactggtccaacagatattttattctgataaatgttaattgctgctcagagtgcctgaccaaggtaatttgctgaagcgtgagtttgcgcttccctggttctatttgtctgcagacagaaggctgtttggaggactgaaatgtgggcatgttccgcgtttgtactcttggcctttggggacactgctcagtgcttgcagcagggaaggaggtggggtttctcaatcacacctgagtgcttcttcctacaacttcagcatcctatggcttcctccttctcatcactcacaggactagcccccacacataggctggctcagctgtacagagcctggcgagagagggatcatcgcagtgtgcaaaggaggaagtggggagaggtgatggcagaggtggcagctgaggagagagggctctaaggagcagatgggaaacaggatgggaaaaggagatgcagctttcatcagtgccggagggaagaaaatgaagtgggaaaaggatgagagaaactaaaggactagcgagatgaggaggtaaagggagagaagtaggtattggaacaaaaattgaaaagggcaagaaagttggggcaggaggaggaagtaggaaagggagacaaatgggatgagataattgtatagaaagattccttagagcaggtgtttatgcagagattctgggctcaggaagctttgctgcgtggaagggtagagaatgtctaagaccactagcttgccagcctccactgattccccaaagtgaggaggtgtcaggtgtcaaaatattcagtggtgacgcatgaattagcagagatcaatttgtgtttaagaaatcttgatggaacagcccaaagcacagatcaaagccatcaagcgaatgagactgttcatccaattagcacaaatccagcacctggctctgtggagcgcagcagctctcaggctggcatcttgatggggagtagggttggctttgcttattcacttgtctgtttgtgtgttctgtgccgatggaggaaatcatcttcaggaatgtgctgcaggctgtgcttaaataaaggtcatcacatccctggtttttcaataatcatgaggcatttaatgtgaaatgagctcattccccagctcaatttaggcagcatttccactatctaatgcaaatcaatgatgactctttggaagggatcagggccaccagcaatttctgctgtttgcaatggtcaggggaaaatgccagccctgggctggggagattgagcctggcacagctgtgggccctggagactacattaggtgggttcctgagcatacaaaccacagcaattgggagctgggactgcgaagtctgtgtgggacccagccatctctgtgtccctggagctgcatcctttcttccaggcctcacttctggatttctgtccagaggccccagtggggtaggagttctgtcctaaatagaattgacaaatgccttgacctccaacttagttctttctgctctttcttctttgtaagtggacttgttacctttacgcctagggctaggtcagagcccttgtctaactcagagatatatttgtgtaatcagttccttccttccttccttccttcttctctttccttccttcccttccttccatcaatccgtttttcctccctgccccttccctttcttcctctttccctccctccctgccttccattttccctccctctctgtttcctctctttctctttctttctttctttctttcttcctttctttctttctttctttctttcttttctttctttctttctttctttcttctttctttctttctttctttctttctttctttctttctttctttctttccttctttctttctttcttactttctttctttctttccttctttcttctttcttccacaagctttcaaaacattttatttcctgcttttatttttctccaaaatgccaacctagtgcagtgatcccagtgtgcacctgggtaaggtttctgggatcagggcatatgagataatgtagttgcttcttggactaaatcctagtccaagaggtaggctgacacctctgctctgtcatgaagaaaacacaagccacatctgccagtctcagggtgactatagctaccatatattgttgtataggttgtgtaacgaacaacccaagagggtactctttacatagatgataatgtgaatggtgctccctaaggttgggcagtatacaacctgcacggccaaccactgcagactatctgggtccccacaaatactgcggccatgctttggttgtactaagtacaaaacagggcattgaataaacagtttctgttctaaaattggctctcactaggtgcttccttattatcaccatgcaaatgtcctggactctggatcctgtatatagagacctttgagacctcctgcactttatgaccttagctggtcctccatgctctattacctgcttgacctggacataccccattgcctcttcagctgcatctgcatctcaggccttgacctgtatgtttgtggttataattcctggtcagacccatccaagctcttagaccaggacaatctgtcagctttgccagtctgcttccgatttcctaaagaagttcaacttggaatgcacacccccttttgcacaggaattgtgggcatcagatcttgctcatacaatatcagtcacaccttcaggagggcagagttaggtttgggaccaagacctatatgactccagagtttctgtgcttttaccttgcatacacacctgcctttggtgtgtacgaattcccaaaaaagttgcacaaagaacagacactgataccctacagaagagatgagaaataaccctttctaactgctttatccacttacggaggagcagatccattagaaagtcatttctcccacttccctgacaatcataataatcaaggggtagttgttaaacatgtaaattccagggaccactcacacccacagtatcagaatttctagggggatgatcctgggaaatggtgtcaatggtgtctttaaaacacattgcaggagattcctattattataaaaatgtaggaaactttggacacagtattatagtgatagcaatagatgacctcatgctaacagccattccaagtgttttccatgcagtcaattttttatcctgctatcaacttttcaaggtgggtattattatcattaccactgtatggatggagaagggatgcacagagacattaagaaactttcttaatgtcacacagctaatctagtctgactctagaatcagtcttttaactaccatgctgtgctacctctcaaagaaaagggtttattctgtcaacttcatgcacaggaagaacaagcagtcagttgagtgctgagattaaaaaccctctaggaaaggagatttgcaatacactagaagtggctttgaagtccacttcgtcagaaagctttggtgtccatcaaaatgtggcctggagaactagacttgaagctggtatcattcactcacacctctggtgaagaaaggaattagtgatagattttcttgggagaaaggagaggaaggaaaatgagggttcatcgtgtgatggtaggaggaagaagtcgccatcaagtgagaaaacatcagacattttgcaggagagcccgctgggactaaaatggatcaccaggctttcgtttttcacctcacaaactctacccacacacctttgctctctgctgctccagcttctaaataccctgcttgattgtctgatctgacatgacctgtccttcctcccaatccctgttttgacactttttatgacatttatggtttgggtggagtcagggaggtatggattcaaagtctgccacttgatatctgagggaccctgggtgagttaccatctttaagcttcaatcctcttcaataaaacaggggtaagaaacatatagtatacatcaaaatgctgatgtaaggatgaaaggaaataatacattcgagacgcttagcatagtgtctcaacacgttaatcacccagtgaacagttgctcttctgttgttattagccagaaccttcaatgtccaatatgatagcacctggttaaatatgactgtttgaacttaaacttagattgattaaaagtaagtaaaatctaaaatctagttcctcatttacagggctcaatacccacaggtgcctagtgcctactgtaccggacagcacagacagaaagcaacttgtttaactttccatcatcgcagagtgtagttggctagaactggacgagagggaggtatggaccacatattattcaaactattctctaaaatattgtttctctcaggctaattggtaaaaattggacagctgttagttccctgggaaagacatggagagaaggtgttttgattttctagataagtcagacgtatatagtcatgcactgtataacaatgttttggtcaatgacagactgcatatacgacagtggtcccacaaggctgcaatgccatatttttattgtaccttttctatgtttagatatgttttgatacacaaatacttaccattgtgctacagttgcctagtgtattcagtacagtaacatgctgtataggtttgtagcctagaaacataggctgtcccatatagcctaggtgcgtagtgagctgtaccacctaagtttgtgtcagtagactctatgataattacacagtgatgaaatcgcccaatgatacatttctcagaacgtatttctgttgttaagcgatgtgtggctgtattttaaaaacacaaagtaaaaggatagtgaaatttgagaacacagaaaaggttgaccttccgaattgcctgccactccctgcccacgtggaaggtggaccgagagtcatctccaggcagtgtgtggaacctgctttgaaaatagtcctgaacctgctccaacaacagaaatacataacatagcaactcccagtctgccctgaattgtttctcaatatttgctttcttcctggttttaaacagtaactgcttcagtcaggagaatcctctagaaacagaaggaggaacaaaaagaacagttaaatgaaaactttgtttttgtctgccgttggcctagaggccagggacatgctgttactgactcttcagcttctctgctcattgctcctgccaaccttccctcttgtgtgctctttcgtggggttgaggagtgaagggcaattccacaatgactctctagccctttgaagaaactccagcaatgaactagagccacattaatagcctcgtgtttcttccttgatgttgttcttaagtgcgcatagccaaagtaagagatcttgagtgtaagcattgcctttggatagctggtaaacctctctcttttctcagctccaaagtcagtcttttgttctgagtaatgaggaaatgctgaaggaaaggatccatgtctgaaggtctagagtgcttcaacttggggttaagtgtggaactctgaagaagtgggttggtaattgcatgagggaatttccaagcactctacatctctgaccactattgttaggtgaaaacatcaggggtaaagagaggaaatctgtgtgactaaaaattacacataaacatggttcttcacttctataaatttctaactttaaatgcataaggaaggccaggcagttttccactgtgtatgtgtatatgtgtgggtgggtggggggtttggttgggggagagatttgcatacatgtggatttccacatcccagattttcttaagtgcactttcagtataataaatggcaagagaaccctaagagtgtaccccagggcatggcagttcactatggttgatgcggtggatacctaatgtttactcctagaagaagaaataattggaataaggaaatgaaagccctggttaagaccaacacatttcccttttctttttttttttttttttttttttaacaacaaggctttggcttcatgtttatcacaagaacgggaatctgtttcctctgaaagaaaattcatttcacccacaaaacccatattttcccgcctgccttctattcagacaagccccacaagataaatgtgttctccaattcaccagcggtaaggaagataaaggcttggaaactccagaagtacattctcctaattattgtaactggcatttttttttatgtggcaaaccatctattcagattaaactacagcccaggagccttttatgtgaagattgccagtgtggggtggaaaggtagctcaattgtgtgatttcctcagctttaatagcccaaagagaagcattgaaagagatccaagtatttgtgtgcaagtgatttttgttaggaaagatctaaaaatacccacagcagcctgtctccatgttctctccctttgaagtcagcttgagacctttccctatttgaacacccagaaatatgtgtcagaagtcacctgttattacccttatgtcctggtttcccctaagatctaaataaacaaatgagtccagcaaatgtgtcggggagctccagctctgcttcacattaggaatatatttacccatttaataactgttatttatccagacatttaattgcaccattgtaaacacacagggaaacctttgggggaaggaagctcagttgctgagatgagacagatatttaaaactctgctcctgtagctgagccttctctcagagtcagtctttgggactgggattggtgtgagttgtttttatgtggtggggactcaccaagaagcctccacccactgggcatgctgcttttcagaaagtacccagtatatcgatgatgaaggaatgagtgaatgagtgcaggaaaaaagaaccagaggttaaagcaaaagtctccgcccattaccaagagctttgctggtgctgggtgctgggtggagcccaagcttttagtgtgcccatcattctatggccacaatgactctgcacctttgaacgatgcctttcatagcagcagataccctaaagagggagagctctgggcatcacagaagcattcttgaatctctgagtacattctcagctttgttcctcattcttcgatctgttcctcctttatcagtctcctggatttgggatcttctgtttttaggtgtatattaatcctttagacctgacaacagattaaataacattcacttagctctccatacttcctctcagaaataattttgcatttgtttttgatctctctttttttttttaattaactcaggtcataaatgcatctgattaggctctgtatcctgggatccaactatgagttgattcacttggtccaagccagcctggtatccttaaaactccctgctcatccctagctaaggttccagacgccccataaaaagcagttgccattatgttccagaacttctggaatgatctagaagcaacacccctcgaccttttctttctttctgatccctcttgctgtggtctgatgcttctgaattcttccaagggtcatcttatttttgaattcttcctcttcgtctaactctttcagattgatgttacagttggcctgtgtttctggactgtgattttgactttgcccaggaacctctgcagatggtaggtgagttctgccatgtctgttgattgacccaggttctcagaatcttactcttggaaaatatcccaggtgaaacccaaagaagggggagtttggtcaatggtttcatgtttcacccttttgagagtaataggacagcctaattttcttagcaaaggatctcacctgccactcctgacaccagccagtctccaagagcctcacttcttcctcatagggaaatctttctttgagatcccagaaaatgtgaggagtcttagaatccaatgagtgtcaaagttgctgactgatagatggactgactgactggtattcctcttccagtggtctcccagctcttatatggtgagtaaaagacttagcatcactgaatcatggaatattaaatatactctgccaccaaatatgttggagaatcctgtttctgacgtttccctttcagaaggtcacgatggacattagcatataaaaatcctcataaggtctgtagtgatgaaacctgccttactttcctcacccagggcttccatgcttatttgcccaccaaagccatttttcagaatgttacacacacaacatcccttggagctaatattacatggaacacgctttgcaaaaatattgatcttgcttaaagcccctgctccatcttgcacatccatatacacacacttgcacacatattatagttcaagagaacaggcattattctctatttaaacactcttcttcacagagccgcagtcctcccacaaatgcacagcccttctcactcactcattcccatgggggccacccgcaggggctcccatgtcccagcgaaacaccggaaagcacccacattcatactcaagaatttatcacacaaaccagggataagtgaattttttctgtaaataattaagcggcaatgatttcaggctctgccaccatgcagtctatgttgcaaatactcaactctgcctttgtggaacaaaaacagacacagacagtacccaaaccaataaatgtggctctgttccaagaaaagtttatgaatacttaaatttgaattttgtataattttcacattgccacaaaatatcattcttcttttgattggttttcaaccatttaagaatgtaaaggacattattaactaacaagccatgcaaagataagcagcaggctggcttggcctgtgggccatagtttgcttacttgtgctttttgccatcagtaggttcctgaaaacagcatgagcttctgtccgtagaatcctattgtaacatgttaaggagcctgcttctttaaaggatattgcaacgaattatttagcaatgcaaatctcttaattcctaaaccaggtgtcaagcacgggccttctgaatatttattgctctcctctgccatctttagagcacttttgcactgaaggcagggttttctggtttccctgggtcctgaatggggtctcacaccaaaagagcttcctcttttgccaacactagcccccaccaagctgtctggctgtcagggacttggcacctgacctggtctcagttggaagctttcagtccacagttctgtgcaagaagttgtgtgttttaacaacagtgatagcatctgcagaacaaccaagatgtcagtgtcatgtttgcatgctgtcaccaccatgataaacattgcatcccaaatccaagaactgatttgatttactgacaaggcagccctctccacctgaaagacaaagctggctgccttgcccacacatctgctttgtcattagctcggaggcagaagggaaccacagccagccaaggcagtcacagacagcatcttcccctacactccaggaaaatgcagaaatgctcaatcagccagtcatctcccctacaggacaccaggcaccccacttgagaggtacttcccactgatgtgactaaatcagtggtcgtttgggtaaggagcaaacactggtttggtgtgctcttcaaggaggttctgggtactgagcaggtgataggatttagaagtgtattctgtatggctataggtagtggcttctggtcactgaatctctcattaataattcactctgctatttgacaatatttgttgggtacctgtcttatggcaggccccatgctgggtgctgctaatgcagaggtgggtaaacaccacaattgccactctcttggagctcagcaagaaaggcaaagacataatcaatcaattacaacacaaaacacctggagaaagtgcaggcctaccagagggagtaattcagggttcagtctctctctctctctttctttccctctttactctctttcttctcttgtctctccccttttcctaaactaccaaaaattacttctaactaggttccccacttctaatcttgggcccctcctcatcctcttcacacatatccaatcactgaaacaaccctatacttttaaacctgcaaatccaatcatgtaactccctcactcaaactccttccatgggtggaattaatttgcatttgtctgatgacatatgatgtggagcatatttttatatgcttattttccatctgtacattttctctggtgagatatttgttaaagtctttggcccttttaaaaatatgttgttttattattgactttaagagttatttgtatattttggataacagtcctttatcagacacatcttttgcaaatatttttctcccagtatgtggcttctcattttattctgttgatggtgtctttcacagagcagaaatttttaattcaaatgaagttcagttatcaactttttctttcattgattgtgcctttggtgttacatataaaaagtcattgccaagtcctaggccatctatattttccttctaggagtttataattctgtgctttacttttaggcgcgtgatccattttgagttaaatggatctgagtttgtgaacagtgtgaggtctgtgtctacattctttttttgcatgcgaatgctgtcccagcaccattttttgaaaagatggtcttttctccattatattactgttgctcctttgtccaagatcagttaagtatatttacgtgagtcccttcctggactctctattctttccattgatccatttgtctattcttttgccaataccacatgtgtcttaatcactgtagcttcatagtaagccttgaagttgggtagtgtcagtcttccaacattgttcttctccctcaatattgtgttggctgttctgggtctgttgcatctccagatagactttagagtcagtttgccaatatccacagaataacttaatgggattttgattggaattgcactgaatctatggatcaagttgggagatgcccatctcttcatcaattcctactttctgtgtggtgatgatcacatcattaacctctctgagtctctgttttctcatctgtagaatgtagatgataatacttgataccctctactaaggcatctccctcaaagtgaggagcattaaagagatgacatacagatggaggtttacacaagcttgcttggtacatgacaaatagtcagtattagggccactttccctgacccctattctatcttctcctgttttccctgctttatgatgtccccatctggaaatccaggactgctcagattgtgaatcagtattttaaaaaataattttaatttttcagaattattcattcatgactttctgagtcattcttgcctggcacctcagtcatcctcttccactctgtccagtgaggtgaaaagttacgttctctgctactctgggatcagtgggttcatggcagccaaggtcttgaacttctcttttaattagacttgggactgagagcctctcagagtgacctctggatccacatcgcagcctcagtggcactgtcctctgtgcactggctttgtctgactcattgatctgcctctaggcccagtgttgactattgaaggtcactggggccttcatctcaactggcgttccagccctacttcatgtctgaaccccagtggagtgtgtgtgtttagagctgggttaactgagagacgaaagaggtagtggttgcttcaggacctgcctggactgggaaatctcccacagtgtggattcataggcatttcatgcacacacctctgagtgccaatacctgaaacttgccctgagattggatgattgattgtgcctttcttagaatcagcttttgataaagggaaagaagggtaagaagacatggatatgaaaatggaatgagcacaaggtttctcttcttccttttcttgtgtgtaaactgatacacgtatccttagtgcacatggaactcgtgagttgatgagagtgcatggtgtacccaaatactgaggactgacatccctcagaggtctatgttgggaacccagcccgaaaacttataaatggtgtgtttatcttgaggaagaaatggcagctgccacaacacagccaggaatgtggtcttagaattttatttagtgcatgaatgctaacaagttgctatatgtgctgtctctctccatcctgcaaagttgaaggcatcactaatagatcacagcacatattcctgctgaacctgaactaggtcttggaattcttttcaataaagcaaggactattctcatatccacctggaaactgagctatctccacctgcttgaattcccaccattttgaattcccacctgctgatctcatactttcagggccctgagtaagaagaaactttagatttaacttccttgaacctagacattaatctgctgctttttaattcttacaggtaaactaaatatatgcatttgaaaaaaaatcacttgtacaatccaggttgtgaaatattgtttaaactcattcataggttagtaggaggcagtttatggggcaaagagttgagaaagctcttggccatgggtcaaacagtattagggtatttctggcagggaaatgtcttaacgttttagggaattaggaagaggctgttgtgggaagggcaagagcaattgtatcagtctattctattggtttccaaactttgctgcacattagaatcatttggggatcttttaaaactctgatgctcaggtcatacccaacactaattatgtcagaatgtgtgggggtgggcatcaggaggcatcagtaattcttgttcttaaagaacccaggtaatgattcccatacagagccaagtgcaggaacactggtctggatgcaatgctgctttatatctgcccatctcccttctctccaaaggtgtcttcagaattcatttgattctcacaatagctccatgaggccatctgagcaggtgtcactgccccatgggacaaataggggaactcagccacagagaagtgaaatggtttgtctaagttcaaattatgtgagttagtggtgagtcctgggatcttttcatgtcaggagatgccgctacattgttatttatagaaaaaaggaaagatgaatgtttttatgtaaaaaagattatcagggtatgcactaaaggattagcatgtggcacccttaataggtcccattctggaaggatattttccaaaacgaactatgcacacacacatacacacacacacacacacacacgtgcattcacacacacactccagtataacaactaatgatagaaaaaagggaaacaaaaatcagtgactctcctatcctggcctcagaacagccggggaagcagaaatccctttgcagggtggcttccatggcagaaggtatgtaaacggcatgggcctttatgaaaggggagagattcacaggacactatttttcaggctgaatcacaaggttcagtagctcacataatgagattatttcaacctgcaggtcaattggaaaagcaattacagatcattaaagcacattgcccagctcttcagccctgcctgctccagccctccttctctgtgtctatcacttctggccctgctcttcatttcacatttggagccagagaggagaaacaggggacttgatccaggcagactgcaaaggctcccacgggagaagatcagacaaaaattcccttcttgctcagtgatcgtttgaacaaacaactcgtcttagagaggaaaggattcacgctcatatccctccatgtgctggacaccatgtgaaacattttgggtttttttgcaggcattgtttcatttaatctcccttagctaatattaagcccctattagtcaccagcccatgaatgccgaggacttgctactcgtgatgtttcttcccagtctgcacatttgcagtcatccctaagagatcacagcacacattcctgctgagcctgaattaggtcttggaattctcaaccaaccagggagggtctgctcttacattggctttagaacctgagacatagtctactgaactcactctcaggggtttttccattttgttaatgaagtagctgaggctggcagaggggcagcaacttgcctaaggtttccctgctgggaagtggtacagctggaactcaaacccagaccacaactccaaagttaatcacagtactggcattcctatcggtcatgtttgctctgacctccatgctcctgcacatgcagaacttctcccagcttggctaattcatattcattcttcaagacctagtttaagggtcacttgctatatttgtgaagctgctattactacctctccctggccctctgaatattagatgtccctttttctctccctgttcctgcaccaccgtgggcacactttcattatcagataaaaacccctttattgtaaagtttagtttcttatccatgctaattgtggatattgtgaaatattaacagatgggttttctccaagtatctagtgcttcttctgcctctcccctacccacagagggatcagcagggtgacggcatcctttgccaattgctcttgaggaagggctgctatgtcagcaatgccatttaattgagtcaatggtcagcttttaaatttcatcacactgttcaaatcaacaagacaacggctttgaaggaaaaggctcttagcatgtcaagagcacaagtctaggtctaaacagattaagaagctttatcattgtcatttttcccctgcctgtccatgagttgggggaggagagattggagaggagagcaagacaataagatgctggtgagcactcaggggaggccagagggaaattgtgcttgcttccagggtggggaggattactcaagaatgagagtaagatgctctggctcgcccatattgctccagcccagggcaggagtagaatgtaggaatgatggatcctgggcagagaggacctgacccagctcctttaagacttctggggctctagagaggctgaggcgagcatcagaaattttatgtgaacccaagagggatgtggaaatgactgagaaagagctcatatgagattataatgtagatggtgaaattgaatcagatctacccacattagacctaggacagattccatttccttaggacaaacaggatcctacctggaccctcccaaagccactgtgctcctccttcagactgaacctctcactgggtgtgggtcttcttggcaggactggtgggacttcccagcacttgtcttaccccagggctctggcctccagaactcagaaggtgggagggggcttcttatgttccctgtccattttttggctcagggtgagctgctgatatcctcatctggtgccagggccagttccatccttaatgggcaatctcaggggacctggcagcttgatgtgggacagagagcatcatccatgaggttctaccatggaaagcctttataggatagtgaccgcagaatggtcctttaaaggcctgtagaaattagattggtaaacaagttggggaggagcacggaggacccagaggtagagagcaaagagcccagactagggatattagtgacatccaccaggctggaaggaacaagtctgcctaagccactcagccgcaaactcagtcttagaaaaggacagggtgacatcagatggtcctcaaccgcactcaaggttgaaaaaacaaaaaacaaaaaacaaacaaacaaacaaacaaacccagccccagagtgccagcattaaagccaagtttttttgtttttgatttttgttttttttgtgacggagtctcactctgtcgcccaggctggagtgcagtggcacaatcttggctcactgcaagctccacctcctgggttcacgccattctcctgcctcagcctcctgagtagctgggactacaggcgcccgccaccaagcccggctaattttttgtatttttagtagagacggggtttcaccgtgttagccaggatggtctcgatttcctgacctcatgatccgcccgcctgggcctcccaaagtcctgggattacaggcgtgagccactgcgcccggcctaaagccaagttttaaacaatgagggtatcctccttgctggtgataaggtaataggggtgaaagataatttggcatgctttacatttttttgttttcaagaatagttgctgcctgggaacaggcacttcatacccacacgtttccgcaaatctgttggtttcctgaggttgaatggttggtagagcacagtggagggagaatgaggaaggtctctgtggggacattctcttggtctccttccctttgggccctcaattctatccacacctatgattcaggtgggtaggttcacagagcatactgcagggggactgtggctggcaagagtggggacttgcatggagaaatgagtttctccatgcccaggggtaggagagtagtgggatggtagcttcacctcagtctttgtgccactctttcctcccaggagattccgccttttaaagccccaaggacattcagctggaagtgtaagcctaaattcctgcagccctatcacatatcaagcttcctccatgggaagcaaagaaaaagcaaagcataagtcacaggctacttcccggcatgactgaagtgacatcggatgcaaaaaaagtatccgtgtgtgaccatgtgtgcgtgtgtatgtgtctgtgatgtgggaagagaggcagaggtctgacacttccgatttggggtttgagtcctcagggctcttaagcaaatgtgagacagcaatgcaccattacaagcagcctctaatttattgattgactcttcataaatgccagctaacaatgttgccataaaataatgtgcccgtaaaagacctggaagatttctcttatggaaataagggcagcactgtgcttctacattgggtgtacaagtggcagaggggtgtcactttagcaaatcctagaacttactaagccaagatggatgggaacctatgggctttattagcctgtctgttgggatttgcgtgtgagtggcacatatgtgcaggtgtgcgaccgcataattattcataatttttctgtctgtttgcctgtataaggatctatgcaggtccataaacagacatgtgtgcacacacattatgcaacgggagtctgtgctagtagtgtcttttgtgtactgagttcctggatagtggggtctgtagtctctttatctgtggctcccaatgtctagtatatagatgttttataaatgtcagttgaaatgggaaaaaagtgcatatgtgtctgtgagtctctgaggtgagccttgttggtatttgttggactgtgtgtgggtatggggaccaagcatgggcattgaggtatgacagtgtaggtgtggtgtgggcgagtgtgttctcaggaaggcttttgcaaggctgtgagtgtgggttaaatatgtgtgcccttcctgagacactagccatctcaggcctcagttcccatctttaaatttctcagtttcccatagtggggtctacagaggccctgccacctcacataggctccgtatctgcccagctcctgaatcttcctaggaaactggccaaggaaagggcacttgtggagtctacccactgggtagttcacacgctctggttggtttaacttggggcatggcccccacaggctgttgctgaatatcatgttgtcccctgagttccaatcctccagcactgctcatgaaaaccctgggctgtgcctcattagcccaaacccattgtgtccacactcacccatatttcttagccctctttttgttttggttcctgaaaaggtcttgacttaactcacccctctttggaggatctgaattcctcttaccaaactgacaccccttggataatcttgactattggtggctagggatattgcccagggctggtggtactgttctgctcacctgaggatatcaatgtcatgttaacttgcattctgttagctaatgactggataccagcttattaccactccctaaatgaattgatttgtctttgtttactcgctttactgtccttgccatttccatagagagaatattagaaatactagagctggaagtgttcctagaatgcatctactccaatcctctcattttacagatggggaaactgaggcccagaaagggaagtgataccggttatttttgaattatttatttcacaggaagtgtattgggtacttatgatatgccaaatccagggctagtatcacagtctacgggggaggatagacatgtgggctattatagtaaaatccaagctgatggatgttattacatagggaagtgcacattacatagggacactttgttatataaggaagggggttattacatagggctgtgggaacagagaggagaggctcttacacagatggaagagatgaggggagacttccagagcaggtgacacatgagttgtttcctgagtaggagctcaccaactgaagggggggcgggtggggtagagaaagtttcagcaggtggagaagcttctaatttaatgcattgctatgggcttctttccagggcacctgcttctcattcttaatgttccaaaatgcggaggtgaagatgaatggagggaaaaaggggatggataataaaagtctaaaagcatgaatgaatgcatgaatgagtgaatgaataaaacccacactgttaatgtccatcatgagctgatatatcatatatgttagctcatgtaattctggcaacattgcaattattctcatttgacagatgaggcaaatgaagcttagagagactgaataactctcaggtcatgcagatagagggaagcagaattcaaatccaggcctgctgggcactgcaactaacttttctaccctaccctgatgccaactgttgccaacctacttcagacatcacatgaaaaaagtctgagggtggtatttcacttgactcttccctcttagtattgtaagggagggtagtccttgtcccctactcaccagccacagagaggggaagaatccctccagccctccctcctgcagaagaggcgaacctttcccatctgcctaaattcacatcagtgaatcaaatggagtctctgccagtaagcatattaatggggcctttcccagtccccaaatctgctgaatcttcatcttcacttgaagccaaatgaagtttgatttttaattcaccttgcagagtcataaagcaaaccagtgattgcagttaatgctcaaactctgtctctttccagggtctgccgcctgcctgccctcacggctgactctgctgagctcacaccgcctggcaggcacatctcactgctctcccagagcagcagtgccccagcggggctgcacactggaaccacctggggagttttaggagcaccgaagcctggcccccatgccagagggtctgatgtcattggactctgggcatccggattcttcgacgttctctaggtggtgtgggcagctggggttgagaattcctagcccaggatgcatccttacctgaggcacttgggatttaaacaacctcatgctctgagacgtgcttttgatgctaggtttccctgaactgtgcttctcttttgaagatgaatcttttgttttgttctcttttgggggatccccctactgcctcagactctctgagcctgagttctgccttgcctttgtcatgctactccctctgcctacagatggcctgagttctgtgtctctaacctgctcacagacctaactggtgctgccttctgcttagtcttggattgcttcctataaagacactgtcacactgtcttgggagcaagtctcatgaaagaaaaacagtgccatttcagaggcagagaatctttggtgcaaattctagcctggacattcactggtttgtataacctccctgagagcagttttgtcctctgtcaaatggttgctacggctgtttattactgtacaataaacccacccaaaacttagtggcttaatacaaccatatttattttattaaatatttatatgatcttattaaaatatttattttcctaaagaacccacgatttgggcagggctcagcagggacagctcatttttgctctagtcagcatcaacgggggcagcttgaagcctggggctagagttctccaatgccttgttcatccacatatctggcagccaaggccagagcgctgctactgcttgggcatctttccctctttctgcctcaacatggtctatacagcacatggtttcggggtaccacatttcttgtacgttggctcaaagctcccaaggtatgtgtctaagacagagcctgatagaagctgcatcttttattgaccagccttggaggtcatgaagcatcctttccacttcattctcttcatcagcgcagccataaagatcctcctggagttgagggataaggaaatagactccacctcttgatgagggtgtaacaaggtttatgaagagcatgtgggaagggaaaaacattgttgcagccactttgggaaactacaatctgctacaatgggaataagaatactctattgtaaaacagatttattttggtgattaaagaaatgcatcctaaactcttaacctaaaccaattagcttttattatgaataaaccttttgcatatattacctcactgaaacctcatagcaactctgcgaagtaggtactacttcctccttttacagaagcaagatccatggttcagaagccagctcaggtcatacaatagtgagttacaggtctggatttgaagctctatgtggctctgaagcggtggttctcaacctcagatgggggaaggtaattttgtcccccaggagacatttagcaatttccagagacactttttggctgtcacaactactgtgggtggggcaagtgacacaggcatctaatgggtagggatgctgctgagcgtctcctcaaggcacaggactgcccccacaacaaagaattatccagcctaaaatgtcaatagtgctgagattgagaaaccctagatgatgttttaaaccactacttttttgtaggcatttcttaatgttgattcctgcttttccttcccccaatttcacttgccattccagcttctttcctagagcagcccttggctggtgtttgttctactgggtttggaatgaatcacaacaattaaaattgggcatgccttccaaggccccatcttgctcaagggagttgaatccaggtctaggagatgagcagtctcaggctgcttgcttggggtctactgggctaagcttagctttgctcagagaaaaagcatcatgcttgtggggtggggagtcttttgggttatgacccatgtgctatttaggaaaaacccagggataatgccgtttgaagctggtggcctagctatatgcctttcctaagaaaggctcttcacagagctggtaagtatgcctctcagctccaggaaggatggaggctggaacagtgcaatgggattctttcacatctgcactgatgtccgtacaatttagtcagaggtcagatgttttaaaagcactagaaattaacctttagcttaaaagtaagtttctgtcaccctccgctcctctctctattgctcatgggcaagctgcctaatgaacatagctcagttccaattgaagctgtacagatacttggtgcagcatgaagttagcctctgaaggcttttaggaagagctaggaaactgtgacaaaggaagggagatacatttatgccaagacaataattgcattaatgctctgtactgaggacttcatgaatctggatgtggtcaaggcctgggatgtgaagggcatactctagaattaagtcttcttttaacgtggccataacaatgacaggtggagctaagtgcaacatcagggatcattgcagtttgggaaattctaatgctgagactgtgaccttggccatgccagaggatctccggcagagttgcaacagtgcatcagtgctcgtgccaagcaaacttggctttgaatctgggacctgccacttacctgctgtgtgatcttgtgctagttacttggcttctctgagtcacaaaaaacattaaacacaatgacacagaacagaaactcaatgtatggacattgctatcattattcttaattcggttctgcagaagctgaaaatctaatctggaaagagaaattgctggagtccctaggatttgaatttggaaagctgtatgtcacctcaggcttcggtctcctgcctctgaattccctttgctgcctacctcaaggagctgaaaatctgagactcttatggagtttgcagtcagaaacgagacaatgatagaggccccagctgcccaatatggcaactactgtccacatgtagctgttgggagctcaaaatgtggctgatgtaactgaatatctggatttcaaatttcatctctttttaattatatttaaatttaaaaagtcttactaggttcagttattggaagacctttaagtatgtctggaacaagttgatatgtgaacctcccttttcaactatgatgtttatgaaatcaaaatacagaccagttattttcattgaaaactgagatgagctgtaagtataatacgcatggcagatttggcagacttactacaaaaaaagaaggtaaactatcttgttaataatttcttttatgtggattacattggttacatgttgaactgatgacatgttgaaatattttggatatattgggttaaataaaatacattattagccagcaatttcatatgtgaaaagaaatatcatgatgggcatgttggcttttttcccctttgatgccaatatacgtgtatacaagtcagtcaataaggtttgttctaagggtaaaagtgtagattctaagtttacaaagctaaagagtattaaaaaacatttgcattctgaaattaaataaaactttaataatggaaaaaataatttcactttttaaaaaattattttttacttgattaagattttttaaagatacaggatgttgacatgttactcaggttgctcttgaactcctgggttcaagcattcctcttacctcagccttccaagtagctgggactactggtgcgtgtcatcatgcccggctcacttatttccttttacttcacttaaatgcggctgttagaaaacctaaaattacgtataaggcttgcgttatagttctatcagctactgctgatgtagaccacccagccagctttagatctagaccctagactgcctctcatctaggtacaaacagttctgccgggagttctgcattgggctttagagctaatgcttgagatgaataaagcacgcactttttctgatttgtttccttgcctctgtgtatgtattttccgtgaggaccttgtgggaagatgtggatggtgggtattgatggggtttggatagccctgaatctctttcttagtcaaatcccatcttaacattggccctttaaagcaagttgctttccctttactgaatgtgtttctattcttccgttgtcccacccctcaaatacctagcttggttagtttactgactgcagagacgaggagttctccatcttactggttcaaaacatatttccttcgagctctagggaaagccttctcgtccaaacacttccagatgtggagagctaatctttgttgagtctatgcacacctcttggccctttaatacacttgaggcttggcgcattttgatctcagactttctgggctgcagtgtccagaaaggccctgaaagccctgttgaggccctagcacatgccgactcctagtaaaacctgtgcagtgaatgaggaggaaaggcaacaggtgctgccacaagtcaaacaaggaacagatgagccagccttgtttcccaagtctaatttgcacatggcttcgtgatatttaaccaaatgtgggaagagaataatatttctcctatttatccccaagtcagtcctgaaacagattcatcagcaaactcatttccttctcaggattttcggtaactgtttcacttgtttattgaaagggaatgacagccctgattaagttcacacatattctttatctaaagagaaagatccttagaggtcactaatccaatcgctgtgtttctccgtgggggaacccaatacctggaggtataacagtgagcccctttcagcttggaggttgtgaaatactgtggtaacagtcttctgttctagctgggaaggtgggaaattgtggggatgcagcatgtgatttagaaagagatacgaactggttggaatcttggtttgaccacttactacctatgtgtttctgaccaagacccccttcactctctaaacgtcagcttcatcatctgtaactggaatgacataacctacttcctgggtttgtttgcaagaacacagaacctgacataaagtaagtgctcaatcactggcagctcaatcctctgagctaccgtaatacccaacatgtctgttagtggttggcttatgggctaggctgcctctcatgtaggtacaaacagttctcccgggagtcctgcattgggctttagaggtaacactttagatgaataaagcatgcactttttctggcttgtttccttgcctctgtgtatgtattttccgtgaggaccttgtgggaaggtgtggctggtgggtattgatggggtttggatatgtgagctcctgagaaattagaaacctatgaattccccatatttctcatcatcttttactttattttaatagatcattgaagcaaatccttcagatttttcactcttttctaatattcttagtcagtgatggcagtggaaccccagcttcaatgttattcctcaggtttttgggaagagaggagatgagataaacttcaagtcctgaattgatcaataactatgtttattcttgctctgattcttgtccatatcaacttttgacaggaagaagcagacacaacagaggtaatgtttgggtgggacactattaagccaaccaagtaaatggcctgggatgtggttgtgagttcttcataggtttactcaaaattagggaaattctatacctaataccttggatcatggcaggaaagatgtcgttatctacaattttagggctcgctctgttgaaagcagcatggttgaaaatggaaagcttgatcataaatttagttttagatttttaagcatgaagtaatggccacttgctgagaaagtttgaggttgtttttatttttaatgatcacctcagttgagaagtgcctgcatgcagaagatatgcagtgtagacaggagacccgagttcaattctggactctactagtgactttctctgtgaccttggagaaatagtggctgtgtatcctatagacatttatcctttattctgcaccctgttcagtagtgggggctttatgcagtcttgcttcttatcacagctgtaaagctaactaactagctcgatgacacaaggctggtaaatagtgacaggcaggatgagatttgaacccaagccttctggttcctgaagcccatttccatcccactgtgtcatatttcatttgcagaagacaaagtctggaaggacttagaaaaataatcatggaaatttgtggggttggggaaggtttaaacgcataaagtcaagataagtttggaagtagatgtgtatctcgagtcgagagtcagaaaactgcctcagaagcccatgccccagagagctgtgtccatggctgtttctcactcttcatgttcccataggccattagtgggtttcagcttccagccgtgtctgtgagtagcagcaagggcagcaggctgatgagccttacactgatagtgtctcttctctgattagtatcggccacacttctttcattatgtatgtcctttctgttccttcattcgccaaacctttggtctctatgttgcaggcactggactacagacctggaccaccagtaatcccagacctcttctgggttagatagaaggcagatctgggtactccatacactgttctttccaggcttcagcattggaagtttttccagctgctggcttttatcactacctctaactctatcccatgcccatgttttggtgttttgggttctttctgttggtttatttggtgtctgatctgttgaggctgctctgatagttatattctatggatgtgccattcttctccacgtctggcttctctctttgcccccataaccagctgcagggggctaaaactgaggagagtggattgtttcaaattcaggcagtttgtcaaaagtgaagacatggcccagaagggtgacttaaaaaacagagaaaacatggagattataaggaaatgacccacaggaaccattcttataagggagaggagcaatggggatgggcttttccaaactggaggtctcagaactccaaacagactacctgagataaagggtattatttttactccgaatgcccaggcgggcctatatactaagattggaagcacttattaagataggtaactccgtgtccttcagtttggggccaaggactatgaaggacatctgaaagatacattgtgaagaaggaaattaaaagaaatctcctgatgaccatctcagacagatattagcaggtgtctgtgtatatatgtatgtatataattttatacttttaacatttatacttttataattttaaaattatatacatatatataattttttaaagaaaaaaggctgtatagcagttataagtatgagctgatgagctattgaatcagattctattgaaatatcactcctgcaacttatttgctggttaaccttgggcaaatcacataatctctttgtgtctgtagttccccattggtagatgacatggtttggctgtggccccacccaaatctcatcttgaactgtagctcccacgtccccatgtgttgtggggtctttcctgtgctattcttgtgatagtgaattaagtctcacaagatctgatggttttataaaggggagttcccctgcacaagctgtcttgcaagccccatgcaagatgtccctctgctcttccttcgtcttttgccatgattgtgaggtctccccagccatgtggagctgtgagtccattacacctctttcctttataaattagccagtctcgggtatgtctttattagcagtgtgagaacagactaatacagtagatgacaatattaatgacacccacctcacagggttgtggatagcattgaacaaggtgatatacatgtgcacgtctctctccccgtctcgctctctacttctatctctgtatgtacacaatacccagcccatagtaagtcctgaacaaatgcttgctattgccattatgtgattctggaacttcactaaatttaccatgtcttctattttttgtcacttcccaactgcataccttgcctccttccctctaaagtgtagcagtaaataccatatcataagaagggtcctagccttgtctctagaggcagcaaggtggaacaatcaatgtgtcccactgaggcaggaggatggggtcaaagaagaccaaagcaatagggtgaatttggcggtggggtgctacctaaaaaggcagtgatcctctgggagcactggatggaagaggggagacatctgggatcccctctgagccagagacagagtcctgtgacacaatcatcattccattcctaacaggatccctaactgaggcccctttacaccctgagcaggaaggtcctaatgtttcctctaaagcttcatgcgcattccacagcatttctagcctgcacctaattctagctaattagagcaggggaaagaactacctcctctgaggatctccatcttgctatgtctggcagttcaccaccattaccctcactcaacatcagttttataatctcataatgggtttttctaaaattcacaagcacttaaagacctcaaaactataaaaacctaaggttcctttggacaccatcgaatctaagaacagaatcacaaagaaaaattcttggctactgtttaatccctaaaagaagctgtatccaaatttatcaacaaaatgtttataatcttgaagatgtagtatagttcttaaataaaagatatataagataaattttagttattttttctactttagtaatagatatatctaattaaatacttgaaagttcatttaatttttaattcaggaagtcattcatgattgaggcaatttaaacaactcgggaaaaacctcaaaccctgatgaaattccattagctatgtggatactttaatggtacactgaactaatgttgaattatgatgattctctgttgagatacctatgcagtctaccaattcccttttgggaattcatgcttttagcttttaatgattgaatcagttgattagatggatacaatacagtttcaaggttaccttttatagttcactcctcagaggaagaacatttgctccagccttcccttgaaattcagtggtcccatagagcttacgtaagcatagttcctcttagaactgccctgtgcatttgtgttttgccaccttcatggcatatgatggagggcgcagagacatccctttttgggggagtgaggcacgattgggagctgcttccagtctgtttctaaaatcagggctatagcaactccaaccatctgtccaccaaccatatgcgaggtcccgtgatctcagactgaattttttcatgaaggtcacctttccctttaacagatagattcacagggctggaggaacgttggcgatcacgtagcccattgcctttatttcaccaatgaggaaacaggcccagagagggcagatggttttcccagtgtttcagagctagggaaggactggaatacaggtgctccatcacatgctttttctaccatgccttattacctctgtgctcctaaggaccaaaggtagtgcagactggaccagaccttatgatttgattttcatgttctaggggtggagtaggagagatatagggtggaaaaggagggaagtcgttaaaaggaaaggtagagtcagacatagtgtctgtctaccctcgaggatcttttttataaccttaatagagaagcagtacagatatactccaagcaattaggagaacattataagataatatataattaggtactaaattacatggcatagagaatggagaaacctttatgtattttaagagcctagaagtctttatgaaggggttgggcacataaagttgctttgaatcttgaaagcatatagtttgttgaacagatgagggtttcttctgtatgttagaaatagtctgagattttgatgtggctctggagtcatacagccttgagaagcttacagaaatacttcaagccttagcttccttatctattaaatgggaataaaatacaatcattgagagaaggtttgtctaaacagaaatattcagttgcagtcagaggagttaaactgagcttctcacacaaggaacattggacagggagacaaagacaacatgtttccctagtattttctttactttagacccataggactaggtcctgttgcagctcactcttttttttttttgagacagagtcttgctctgtcaccaaggctggagtgcagtggcttgatcttgactcactgcaagctctgcctcccaggttcacgccgttctcctgcctcagcctcccaagtagctgggactacaggcgcccgccaccatgcctggctattttttgtctttttttttttgtatttttagtaaagatggggtttcaccatgttagccaggatggtcttgatttcctgaccaagtgatccacctgcctcggcctcccaaagtgctgggattacaggtgtaagccacagagcccagctgcagctcactcttatttatgaaggaaggaccaccaaacaacaacttactacagtatttttttttccttttcttttttcttttactttaagttctgggatacatgtgcagaacatgcaggtttgttacacagatatacatgtaccatgatggtttgctgcacctatcaacccgtcatctgggttttaagccttgtgtacattaggtatttgtcctgatgctctccctcctctttccctccactcccgacaggccccagtgtgtgatgttcccctccctgtgtccatgtgttctcattgtccaactcccacttacgagtgagatcatgcagtatttggttttctgttcctgtgttagtttgctgaggatgatggtttccagcttcatccatgtccctataaaggacatgaactcattcttttttatggctgcatggtattccatggtgtatatgtgccacattttctttatccggtctatcattgatgggcatttgggttggttccaagttttgctattgacaatagttctgcaataaacatacatgtgcatgtgtctttatacccaaaggattataaatcattctacaggctttttaaatctgagggtatttagtcttcacctatcccttcatttacatatagtgctctgtaatcttgatatgcctttgattcactgagggtcctctaggggttgggatgagagggccatgtgacatcattggtgcacaatatggaaagagctcaaatctatctggaaaccttttagtccttgtgagaaggtatcatctttgtgagaagtgatcttccatcttgtcacctcatcagtaacttgtatgacctaaatacacaagaaagaggtaagattatggcatgaaacctccaagaagaatatatgaagagctggtgaaattgcttggtggactcggcgcttcctcgtctcctgatggctcttggaatgggatgtgaatgcggagatgaacttggagtgaaatgtgaagatgatgtgagagcacgtaaactggaaaaaagagggtgaaacgttacagtgttattcgtatatgcattgataaaatatattctatttagttccactttggtgtttcattgcccacgcccataatgtaggtgaacacaatgtagataaaaacaattctgaaaattctgacaaccagaccagtcttactcatcttctcattaactcatggcttccaaaagccattggctgctaaaagaaaggaaggcttctagcagaagaaacacctagttcttagggtcgtgtgatggataagtgaaataggagtataaagtgtctgtcatagagcctggaatacagtaaatatataataaatggatatttatttcctagactgcagttccctgagatgtgtgtggtttacttaaagccaaaatgaactacaacaaccactagtttccgttgataggttgaccctgtctctgacttccagcctatgcactggagagaaaggtcttccctgagaaagagaccccacctggtcaacaaaagggtggggtttgagggtaaggagagagttgatgagatccacccttagtcgtggaacagaaaagcagaccattcactgacagccactaagaaatggagttagagacatagaaacagagtgcattgtaggattctgggagctttgtctcttttccttgttagctttggttcttgatgtctgtgtttgtatcattaactaaaaagtgctgcaataagaaggtctcttttgcttgttttcagaaatactatggatggggatacagctgatattgttgtggatagtcacctgggggagagcagaaagtgacagctgtgcagatgacagaaagcagttagactccctggggtttttgggaagataggagcagagtgttgtacaattgctccaaggcaggacattatgttaaacttttctttttttttttttttgagatggagtctcactctgtcatccaggctggagtgcagtggtgcgatctcagctcactgcaaactctgcctcccagcttcaagcgattctcctgactcagcctcctgagggattacaggccactgtgcctggctaatttttgtagttttagtagtgatgaggtttcactatgttggtcagacttgtctcgaaactctgacctcataacccacccgcctgggcctcctaaagtgctgggattacaggcgtgagccaccgcgcccaccctatgttaaacatttttactcagaagttgtaaattaattctcttgtctatataaacataatcattttaaaattaagatatataataatatagcatctactgttcaacccaaagcagaaatattttctccagaatcactgaaaaggagggtgattatgcttgcatgtgttcaacaaagaggatttcaccctattcataggcaacttttcctataactgagttttaaaaataaattatattccacttattagaaagctcttccttataattaagctgaaatctggcttcctcagatttttttttcttggcttgtaactaaggtctactacagcacaatggtttgtccagacttatagatcttccatcttgtcacctcatcagtaacttgtaacttctaattgcttctcttcagtcttattctgagagaagagaaggtagggtggtcctctttttctaggcatcaacttcctgtcctacctttctccctcctttttgtcaaaataaaagtgggcccttcacctgttcttggcatgagcatgatgttagcgggatggggagatcagtcccagttgggcctgaaaacaacttgtggtcatgtggacctcccatctctaacagctaagcatctagtactattatattttcttatggcgtctccctctaggtgtttttaaacatatttacattaaaaaaattttttttttactttaagttctggaatatatatgcagaaagtgcaagtttgttacataggtatacatgggccacggtggtttcctgcacctatcaacctgtcatctagattttaagccacacacgcattaggtattcatcctaatgctctccctccccttgccccctaccctccgacaggtcccggtgtgtgatggtcccctccctgtgtctatgtgttctcactgttcaaattccacttatgggagttatatttacatttcaaaagcaagtcctgcagggcgcggtggctcaggcctataatcccagcattttaggaggccaaagtgggtggatcatctgaggtcaggagtttgagaccagcctggccaacatggtaaaaccccatctctactaaaaatacaaaattagcaaggcatgatggcatgcacctgtaatcccagctactcgggaggctgaggcaggagaatcacttagaccgggaggtggaggttgcaatgagcagagattgcaccactgcactccagcctgggtgacagagtaaggctctgtcaaaaaaaaaaaaaaaaaaaaaaaaaaaaaaaaaaaagcaagtccttacaaatttggctgcccttttaagaaaatgctgaaaatctataatttatatttgcatataaattatgttgtacctcttctcctccctagtcgagatttttgggggcctgctcatacatatcccattaagtcatggaggattttatttccccagacatgagattgaaataggttgtgaaaacactgcctaatgatccctcccggatctcttgtggattaagtgtccctcaagtgctgggaaagttccacagtatcactgagttcctgccttggttcaggccagatcctacattctgggctaccccgaagaccaagaccacactgtcttcccttaaaggattttcaatcatttcttttcctttggatgagactatcattaggcagattgataaagttattattactttcttaaaatctttctctgatctgaagtaaaaaaaaaaaaaaaatagagtcctgcaaagttttggtcaaagaaatgtctactcctgatttgatttgggaactgtcagtgtttgtgcatatggggcactgagctctgcacgcatccacatcagcctcctccctactgacagcaggcccgtctctcccagggacacagatatcattattccttgcaagtgcatggcacactgtcaggagtttgttctagaagagcaaaaaggcccagaaacaatcttgaagaggagagaggagggaagggatggagaacaagactccctgttctgttgacttggaaactcttcgctttggagcagcagcagatcagcccccatgtctcttcctagcctctgttttgttgttgtcctttttcatttttaccctctcttctcttgtctccaaagtattgttgtgagatatgaggaaaagagaggacaaaaaccatcgtagttcatcactatcaacagaaagggaataactggagttatttcttatcatcacctcaactgctctaccaatactcatctctagccttaaaagaggagggaggacctacatcattggttaaggattttgccttttattctccctcaatgtagaaataacgtagttaagtgttggcctagatagactagcaaagtggtatcaaaatatagctggttttgtgtgagaggaaagatgaattctccacaattcctgacttctcacatcaccaaggaaaatccagaaatcactggagacctaggaaggccaggcattcatagtaacagggcactaaatcattaacagcagacaggggatctcagtatatcaatgttaaacacaagcttgagcctctggctgaccagaaggcctaatgacaggcaggcagccttctagacaaaggcagttcaggacgttggagagatacactggcagtgagatagagactacaaatcaaaggttgaaggctatcaagttgccctttatttacacccagccctggaatctgaagccaaccagtagactgctgcaaagctccaaatctttagcaatagccagactttaccgctgtcacctgttaaaagtgtcatgttggcatttaaagattagaaaatatctaaagttaaagttaagtatgtttttgccacaggatccagcaactccatttctagaatatatttactccagatcaatgtatataaatatattccaaggagtagattctgaaatacatgccagataatgcaggtttctatgcaggcccttcggaaggcaggcacaatgtttcctttgtgctgtttgatttttatagtggagacttagaaccaacacgggcacctactgttagaatatggacaagtaaaatatggcaagtacatattacggaatattatgtagtagttagataaaattaacaagatatatgtgtaacaacatagatagatttttaaaacactgttgagtgaaacaaagtttgaaacaatgagagttatagttgaatcttaagtagacacacatgcataaagatcaaatatgttaaaacgggaggctgcattggaaatacgaaataagaagaaaagtaaagaaaatttaattttctttgatggaggtggtttttatggaggggcaataggcaaattacctccataagatgataagcatcccaagggccaatgttatgtctgtttcgtttaccattgtatctctagcatcaagtgcagtattggttttatagaaatattctaaaataattgttgaattaattaccttactaatttaaaaaaaccccagagaaccaaagaagaagaggaaaagggggttactggagtactgaaatatccaaataggctatctgcattcctttgtaatcggggagcagatagtatacgctgttttaatgagaccttccgttctctttgtctgtgtgtgtgtgtatgtgcgtgtgtgtgtgtgtgtacctatgtgtttgtgtttgtgtgtgtgcatgtgtagaagacctgggtgttggagcagaaggaattgtgtatcccccatcaaatgtcacggtaatggtctcagatagaagcagcatgatgaaaagtggaagagacctagaccagaagttagtcttggcctcttctttctgagatttgtgtttgatatgtatgaaggcattagtactgcatcacagacttattgctggtttaaaataatctattgcagctgggcacactgtctatgcctgtaatctgagcactttaggtggccaaagtgggaggatcgcttgagccaaggagctcgagaccagcctgggccacatagtgaaaccctgtcttgacaacaaatgataataaaaaacaattagctgggcttggtggcacacacctgtaattccagctactcaggaggctgaggtgagaggatcacttgaggccagaaactggaggctgcagtgaatcgtgatcatgccactgcacttcatcctggatgggagtaagaccctatctcaataaacaactaaataaaagtaaaataaactattgcatatgggcatgtttagacagtttaactggtttgccacatctatataagtcattatcatcttgccaaagtagtacagcctgctgtcagtatcaacttctgtactgctcagatgtcaatcattatcttttgctttcaaagccactcatctaggtagggggaacttcatagcagagccagggcagggagttttagtagctatccatgaagagtgcactgtacccatgagagcactgtatttcccactctaaacacattccaggcaaggtccttttttagatgagtcttcttccattggagatctctagaagctcatcaaataacgtccaggcccagctgttggtatttgatggtttctgtaatagatagtttttgtctcatgtgaatcacgacagataccagttaaccacagtctcctcatcagtggcagagttgtaaagggccattcactgggggaaggaaagtttctttttcctgtggggacataacaaatacagccaggtttaacatggaagaagggaaaaagggagtgtacttccaaaagcccttaacctactgttgttccaaggtataaggtaaccaatgagacatttgtatgctatttttagaaagacattaaataacacaatttttagtctttctcactgcaacaaatttatctttgccccaagagagtgctgcctctgtctctccgtggaactaaactatgatcttcccagaggtgtaagaagtttctgagagccctcctatgcccaggcagtgtcctgttcaccatgttggccaggcaatggggatttggaggactacacctaggacagtattccaaaaaagacaaaaaaatagtaaaaggaaaagggggtaaaataaataactgtgtttggcgtgctcattcatattttcaataaatatttattgagtctttgccatatgcctagcactgtgggtgtagtaatgaataagacaggtgtgatctgcattctcatggaactttcacattgtgagattgtaattcaagggatccccaactttttgacctggcctcagaggcattctagcctagtggtcaagggggttggctctggggccagactctttgggttctagttctggctggacctactactgttggtttgcctgaatttggacaggttactgtattggttaaaggcagttaattgcaatgcaaacctcttccaacttttagtcaaatctgtttttcatctcttacacatgaattgctcattccagccgtcagtactttgtacgtattttcccctacttcttgtccgttgatttgtctataagttgctcaaagagctcaaatcttgtgaaccctaagaagtcttcactgataaaccccaggtcatcttaattattatttactccctcctcctctcacctgcatttctgttccaataaccttagatttccacaataccactctgacttgttctcacttctgttgtcatctctgggttcagagaagacaagtgactagcggaagatcacacagataatttctaatgttagagctggaatccaaattctagtctatctgatttcaaattctgtgacttttgctatgctctcctgacttctatcacatcatagaggagtctaataaaatatactatttcaatcactgacattttattgagtcttcactattttccaggtcctgtataaaatatacataattgctatacatattaattatcatattttattgtattttttagagatgggatttcaccatgtttcccaggctggtcttgaaatcttgagctcaagtgatccacctgcctcaggctcccaaattgctgggattacaggtgcaagtcactgtgcccagtatatgaaatactaattatatattatataattattaacattttagaggctaataattatgtctatcgtatataatatgtatcctacacacatgaataattatgtatatcatatattatatatatacacacacacacacatatataattatctcatttacccctcatacagcttttttttttttttttttttggagacagtctcactctgttacccaggctggagtgcagtggcctgatattggttcactgcaacctctacctcctgggttcaagcaattctcatgcctcccaggtagctgggattacaggcatgtgccaccacacttagctagttttttgtatttttagtagagacagaatttcaccatggtggccaggctggtcttgaactcctggcctcaaattgacctgcctttttagagatgggatttcaccatgtttctcaggctggtcttgaaatcttgagcacaagtgatccacctgcctcagcctcccaaagtgctggaattacaggcatgagcctctgggcccagcctactcttcataaagctttaagaggcaaatactattattatccccattttatagataaggaaactaaggcttgctgaagttaagcaggttttggccgggtgcagtggctcagatctgtaatcccagcactctgggaggctaaggcaggtggatcacaagatcaggagttcgagaccaacttgaccaacatggtgaaacgctgtctctactaaaaatacaaaaattagctaggtgtggtggcatgcgcctgtaatcccagctactcaggaggctgaggcaggagagtcgcttgaatctgggaggcggagtttacagtaagccaagatcacaccactgaactccagcctgggtgacagagcaagactccgtctcaaaaataaaaaagttaagcagatttcccaaggtcacaaaacaaaaaagatgaaatttgaatctgaatctgtgaatttgtatccttttcattatttgtgttttactgtacttagtacactggttgtccaacagttatgccaaaataagtgctaactgatcattaaattatatctgagttcctacagccttttcttgagcattctctgtactgattacgtgggctgaaagatcaatgggctttggcttagtgtggattttctgggcttcctgaactcttccctggtgtgatgtcaagtcttctgataagttttcgtctctccttaggtctttcaaatcccaaggtggtatcaagggctgctgcccagatcccaaactcctaccacggcttatgggtgcctgggacagtcccgaaggcctaaggtcttgctcaatcaatggccttgcattggccctgagattctgattacagttgttttgcaaataatgagaaatttgaaaaatattgctgtcccctaaattgagccagtcctaacactcacaaaatccataatggtatagatacccagatagaccttaactgtgatttaatagtgctcactgtaatttagccccagggaaatgtgctttcaattaaccaatgtaagcacaatgtctacttatcccataaatgttctcctaaatgtgctaattaagacctagatccagtgcttctcatattacactctctttcctttctcctaaatgcctctctacttcaggatcactttatgcttatctggagtgtgggcatagtagtctattgtctgcctccaattttgccctatgtgccttaattcattctctacagggcttaaatctgttaacaacgaaaaacaaaaaacaaaacccctttagtgactcaccctgtttaactacactctaacttctggcctcctccatattatggcctctcacccacccttcctgtctcatcttctatttttcactaacatcatccaaactcttctacatccaggtctctgtgctgttctctctttctgaactactctacctccatctgttcacctgaaaaccccacctcttccaaagcctccaagaaaaccatttggtaaccaatctgcttggatatggcatacttccctttcaacttcatgctgatttacctgttctttcctaatggaatttagcatatatgtcctttgctcctactgctgcttgagtctaataaagaatttgaagcagtagttttgtgtttatgtaattatgtatttgtcttcttctcccaaccagagtagaaacttcttcactagggcaactttatctctgcatcttcacagggatttgcacacagatgcttcataaatgacttttgaattaaactgagttaggttgaaatgataggaagtagaagggaacacactaactattgagctctttaagaaggcaaacagagtgggcagccattaagtatccccagtgttcgagagtattggtcctgcttgagtgaatgaccagctgaatttcttcattcagaggcttcacccagatcatgttctttacccctgaatagttttcctagtcattcagtacaatccttaagacttgatcaactatcagatgacacattcttaaagcatcttctcataaataaataactacaactgtcaatgatgatgcaatggtggttgtgtgatagtacttgaatcaggagtcaggctatctcagttgtagcctttgaaatatcatttaattgccgtagaactggggaactgagcctgagttattttatttgtgtgcctctgtacacaacaatagttagataactggagtgctagcagcatgtcgctttatgatctcacacatgctctggatcagtggtctgccattctgaatgcccattaaaatcacctggggagctttaaaaataccaatgtctgccccaacccaaccaaatgttatagtctctgaggtctaccaagcatcagaatgtctttaaagctccacaagtcattcccaagagtagccagagttgaaaacttctactatagaccaaggcttctcagattttaatgtgcatgcaaaccacctgaggatatttccagtctaattttgtaggtgtaaggaggggcccaagaatctgcatttctaacaaactcccaggtgatgccaatgctgctagtgcatgcaccacactttaaagaataagatgcaattgattctgtataagttccttgaaagagctgctcttagaaggagccatctgactaactacatgccctaataggtgcctccaggatttaggtgcttgtctttcttcagattctggggagcatctaagagtgtccaacttcagaacctatgaaatgctccagaagcaatcaagacaatagatctaaatagagttactgacagaagcagatgcttcagagactagcacaacaggtgggtacccaggaacattgggtgaaggctagcacaaggctttaatgataaactggccatcacatttctaacacccagagtcccacagttcctagcattctccaagacatctagacaatgcattaattaattcaagcaaaactaattgatcacccattgtggcagtcatttatttattgtctcccagccccaaactcacccttctacactctgatatgtaattctggggctgggactctgcaaaccacatttatcctttgattgctcgctctagggtgaccaattgtccccattttcctaagtctgtttcccattttagcactgaaagccttgtgcccaggaaaccccttattctcagttaattattctagctggcttgctgttaggttctgcaaataggtgacattagggggagatttaaaggagggataagggtctgtcttattcctgttttgtttaccattcctgtcattgctacctgagttagtggcaggtaccacccagcagcagcagcagcagcaatggttggttccagcctccagctcctttcagcacaccagagccagccttgttgctttgtctcagggatgccacagcatctgggcagctccgtggacctcctcttctgagcttctaggttctggtgattcacctctgcccttgttctccagccttagggataggttgctatttcctgcatttatcatatctgggttatatcagtgagcatgctgatatgctcttttagtccttcaacacctgcataaactgtttcttctattaaattccttctgatgatttatttggtgtggttttcctgactagtttctggcttatatatttgttcagtgcaaactactcagttggacactagaaatattaaaataaatatgacacagctgcagtcctctagtgggaggagagataagtgtccttattacagtgtggtggggacatgctgggcagaccacacaccaagtgttaggggagcccagtgtggggagttcccagaatagagagtcattgaaacgtttctggggaggggtttttgagatgaatttcaactgaggcttcagcaaaactgaagaaaggagcaaagacgcttcaggcatgggaaacagcttatgctaaggcatgaaggagtgtatgtacagcaccgtatactctgggaataactctgcatgtccagaatgagaattgtgagtggagaagtaggagatgttcccgctctccatggaccttcagtgctgagctaagatgtttggaatttatcctgaaatctttaagctgttaatcaaaggttttagaaggggctaccactccaagtggaaaattgagaaggggagttgacatctactagttgggttttaagtaagcttttgttcaatcctataggctaggaattcatggtcctgtgttgtaagaaataggtgattgctttaaataaagacatggaatattaattcaaatcaaggtaggttattcctttaggtacctggacacaccacacacacacacacacacacacacagagcctagattatcttgttgaaataacataaaataatagaatggcttcttttgagggcacattaacaaaattggagcatcttagtctgtcatgaagaaaggagtggctattctgatggacaggtatatatatttaaaggttccagagagtataaaccagactttatagcaagtggaggatcccttaattttcaggaacctggagaccacctgaacaagaaagttacctgaaaaaaaaagactcaactgtgagacacaatccttttctcaagctagctagaataattagctgttctggtttacctgagactaagaagtttcctgggacagggccctttcagtgctaactacacttgtgggcaagttgttgaagataactagaaatacaaagacaatgtgacacaaaattctctggcaagtcggggaaggtgtagacatggactccagaggtctctgccatcagaattgctggttgttttggggaagtgctatgagagactgaaaaggctagtgggaggttgagattacttaaatgcactgtttaattttttttttcaataaaagtctaaaagccaggctttaagcctaaagtgctggaggctattagccacctgaggcaaggcagttaggcacaggtgtgccaggctgccaaattacaatgagtgcacatcccaggttcagaatatttgaaccactgggctctgtttgatgctaaaatgacccattttgaaaccaataaaagaaaatgccactttacacagtgagaaacaggcattaggaacatactgtccctttggaagagtccccgtggtataagcaacattgaccaagctccaggggttatcttcagggacagaagcccccaagagagggaggcatcagtcagtctgagtggtcgttatgggtattttggtcatcatcacaagaaataattgggaagatcttgctcttgtgtcaaatccctatcaacctcaatagggaaggcaccaggttcaagaggccggagaagagacccagagctagcaaacgagacacagggttttactaggggcctacatacacaggagagagtccagtggtggtgagctggacagaagagccgccttatatacggagaatgtccagtggtggcaggctgtacaatatatccaccttatgtacggtccagtggcggagggctagacaacatatccgccttatgtatggtccagtggtggcaggctggacaacatatctgccttatatacagtccagtggtggtgggctggacgacataaccgcatggcccagagacagcaggctgggcaagaaaactgcaaccacacaaacaacatgcagtttatacagcattttcacttaacaccctccccttaatgacttgcacctggcaaccttcatttaacgcaaaactcagggcctcagtgccctgtacagcccatgttccatgggatgggatggggccatggggatggtggtactcagatgtttctcatagacaagacatgggtctccaggttgcctagattccccagctcgggacacacattaagatgcatctaccatacagggtcattctaagggtatgcttaaggtattcctgttaggtgtgtttatccaacacttggaatgtgctgcactgaggtttaaatataaaactgcaaatatccaggagatggagagctgtgtcagtattgaacctgagacagggctgggacgattcagtggactggaagtcacagaggtggtcatggtattatgggacctggcaacaaagttgatacatacatgaaagtggagaaacagagaattaggaaggaggaggtgattgtcttgtcctgtcctggtcatacaaacagtgacttcaggccttgccatgatatatttagagggatattgacaaactggagcactagctgaggatgaagattggacagtgagagaggcaagcactgggaacattcagaggagaagaaggatggcccacgagaacccactcactatgtactgacacgtgatgggctgtcttgtgaaagaggaattagatgggtttggagagggcccagcggggagagccaggatggatgagtggaattccagggagacagattttgatttgatgaaagggagatgtctgtggcagttagaactgagctccccagctatggatttggctgccttgaaggcagtgcctccaaaaagtattcaacagagaaaaacaaacgggccctcagtgttatgcccgtgcacatacgaatgtgattattatctcaccctgctttattttcatcattgcacgtgccatttgcaattgtttgtttctgtttccttattgattgtctttcttccgctggaatgtaaatcccatgagaacaaggaccttatcaggcttatttgctgctgtggtccaagaacctactatggtgcctggcatatggtaggtggtcaatgaacattgggtgagaaacggaaggctaaggaagggactccatcaccgtttgaaaggtaggtttagaaatagcttctgagacaagaaaaaaatatctttcttgaataaaatttctcatgggaccccaatattcaaaatcaattaatgtggcattttaatagtgcacatttatgtcataagtctcactgttaaccgtttattttacatatagtaagaagagtcactgagaatgatgagattgttttgataaacatgataaaacttttgaaatcaaggctactagaagacttagaatgtaatgtattcctctattttcttctgcttacagagcactgggaaaaccctgattcatgcagagaagtagttgcaaatgatatcagtctgcaatagctcatctggcaatctcagggtaattcttcaattaaactgatggagaagcttgaaaagagagtagttggaaaattgagcttggaagccaaatctctcacagtttgtaacagcaggttgtgcctcttatcatgcattcaaaagtcaggcaagaagaggcaaagcttacaatgaatgccaatgctattttgatgtgtgacattatcatgactctgatgagttacacatttggttataattgtacaaccaaccattaagccttgggagtcaagcaccttctccttgcctaactcttaactgaacacgaggctgtgtctctgtgctgtggaactgtctaattctccagatatagaggtgttcaggcataaatttatcttttaaaaaatcagcacaaagatgcaatcttcatagccaataactcattttcaataagctctggtgtatatgtataactttattgggagaagagtcctgagaactacacaaaagtgtgctggtaatacaggttaatgtattggtgctaaaatttggtacatggcatatttaagttgcatgttattcttttaaatgaattttactaattaaaatatattaaaatgaaattataattaaaaattcttgtaggatgaccgtggcatttgtacttaaatgttactagaaaaagcccaaattaagggttccttgtgaacctgagattctccaacactggatgggatggagtcataaccttcaagacatgtgggcaggaccatttagatcacggcaaggagggcagagtaagatggccctaattatgggctttatcataaaatcgactgttgccggcatccaagtaaacaaggaccatgacacccagactctctgccccaacattgctgttgtgacaaagtgcttctgccatattggataggtcaggtgagcatatgaaaacagagatgatagtcatctgggaatggagagtaaccggtcttcaaaactttatttcacagagatggtggtgacttgcatttctgtaagccagcaaaggaagaaataaatttcctcaaccaatttaaagaataatccagctgacagatataaactgtcaacctgttatttagctctattagtgattgcaaatatcagattatattagctaccaatatttattgaatacttactatgtgctagatagtctcataatatatttatataaatttttttatttttctagcaatcctgggatttccatttttgagtatccccattttacagatgggaaataacagatgttaagtaacacagatgttaagtaacttggctaacgccatgtagccaatgtacagtgaggccatgattcagaaccacatactttgactccaaagcctacatttttaaccacattgaaaatatgaacagattatgggggaagctaggttcaggagctgaattgtccagtcataaagtacctagggttttagaaaaaaattccggagttacagaattatctaaaattggataaggttctgcaagtcaagttagtgctatactattgatacctaattctatcatttgattgatatccagttatattgattggttcttaatttttatcttagcctatagtaagacctttttccatctcatggaaacgtacctccaaatttatcatgtatgccaagggaaaactgatcaactctccaccattttgttttacgagtaatattaccagaatgcttgtatttcattgagtgaagggtgcacctgtaaacgcagcattgaacttggaggtatgcagtgggtggtaagagagcagccttgaatgaaagagataatatggtatagtgggaagaacatacatttaggaggaacagagtggctctgcaactacataattgtatgactttaggctgttcattgaatctctctaagtctcaattttccaagttgagaaatggcgataatggagtctcatagtcctgctgagatgatggaataatcgtattttgaatacctgccagatagaggcaccttacctgttagaactctttctccccaccttcatctttctcatgcaatgtatatacatgattagaatgacctcatacatccagcatataaaataaaagcaagtgaatatcttatcgtatattgtgacaagggattgaaaattctaaagaggtgtttataaatacctgaaaaaaaagcttgtaaggatgaggccacattatttcagagtccctattgcctccaaccttgccaaaactgctattagcatttagctgtttagctaaaatgggccttttcttcattgtggacttcctcttatgactttcgtattggcgaggggactttggaaaattcatgcaaagacctaccacatagtcgttttctgaactgcagaattttgtctaagattataaaggccagaaatgtccaaagggaggagacactggatataaacaaaatgaacaaggggaaagtagaaagagcatttaaatgcttccatgtccaggcccagtgtgcacaggctttctggacatgctatggcttgggggctcttctcccgggccagatagggagcaggttctgggagtcagctcctcccagattgtacctgtgagaggaaattcagctgacagtaaacaacagccaagggtccagtgcttgatcttggctgtaatgcatgccccagtctctatcaaaggccaatagccacttgcttcacctgcccagttctgctgggtttgacatgctgagttattttcccttctcaagttggcctcactaatagctctgattgccaagcccttcataattggccttgttctgttgaatctgatctgcagagtgggatgggggaggatgcatgagctagctctaaattaagcaggtaaattaaagatgtgtatgatgccaccccaccaaaatgactatttttcagttagcttaactggcatttccaatctgactcctttcaaaactggatgtttgccgttaaacacacatgcacacccacccacacacaataacaccgtctacttctttcacagcttatacctgtgagcagctaagattctcagtgataacttttttttttttttttgagacggagtcttgctctgtcgcccaggctggagtgcagtggcacgatctcggctcactgcaagctctgcctcccgggttcacgcctttctcctgcctcagcctcccgacagtgataacgttttaagtctacggtctcttccctgggacatgattctccaaggcagagcccagaggaccagaaaaccacaattttcaaacccactgtgtcatctcctcttatcctgtacaattccgtctcagctcctcaggctctcagcaagttcttattcccaccaggagaactttcctagcagcagcaggaggagtctccagttccagccaggaacatctaaacccaggcacctaaaggatttggaaatagctccaacgacctctttgcatcttctctggaaaacagagacttctgggaggcatctagtagggcagaaagaggagccttacaggagaaagtttctagtagcttcaggctctaccattgctgtgcgttttgggaaaaacccacctgttttccttgagccttagttttctcttctgtcaagtggggagagtaacaccctgctttatccacctcacccagcccttcatccaactctctgccatgaggttaccatccagtaagagtcaatcctggggaacaggccttgcagacagcccccatcatcaacactttctccttatatgacctgacactctatttcctgccctgtttctgcaattctcagcaactaatctccaggctctcttcctgctcatggctaggcacacataaacctttggaataaggctgaccctgctcgctgggtacagtcactcttttcccacactccagacaggatactactgtgctctcagcttgcaatagtatatgggacacagcttactctccctgctaattcatcagccaacattccttgagagtcttctgcatgccagggtgcaaataattgaatgagagcatgcctgttatcaaagatagtctagaggaagaggcagatgagcaaatgacaaggcccggtgatgcacagtagcacagaggaaagtacaggccaatgggagcccagtggaggggagcctgggaagccttcaaggaggaaaaaagaagatcaagtgttaggcaggcaaggggcagcaatgggagtggagagtacaggaagcatctgggcaggagatgcaaatgcaaatatatggggaggaagaggagaactcactccaggcactttgggaagtgaatgcattgtctctacttgacagaagatagccaagagctggaagaggcaaagagatttgcctggggcctcacagccagtagactgcacagagaaggttaaaatctacatctgcttacttcagagcctgagctctttgcattacacgctctgcctttccaagtagagggtggtcaaggcaaccagaagggcagccctagatcaaagcagaaggcactgcagcctttgccagaaatcccattctactggagctaacatgggcccccgaagcagccacgtttacatttcatccttgccaataatgaacgtgccaactaaggggcaggcaacctaggttacccagtggggcatcctttttttctccttacatgctcaacctcttaggtcttatacctcctcttcctctgctctcttgaaagtgagctactgcttgggagggataatggcattgctcctgctcccttgtgaatgaggggtgttgtagcccaaaagcaacagaggacaggcactgagctgctggtgccctccctgcttcaaaagggccaagctttagaggctctcatgcccttagggactcatactaatctttttatctagttatttatacaacattctgcagagttgacttgtctcgtgattttacaaaagagcaaaaataacaacgtcagcacttcaggtgcacagtaattcctaattccctgctccccaaggcattctaggcagtagctggatggtacagatgaaggaatggagaggtacctggaaggcaggcaggcttcactccaggggctgacggtgttactggacaaggccctcaacactctggggttctgccaggcaaaataggaaaatatgggaaggggaggcagggataaaagtagtatttgttaaacacattatatgcacatatctattttatccttacaacagataaacattgttctgattctacagctaagaaaaaggaagctctgagaggtgctaattcctttgttaaagtaacatacctaggaagaggcagatcctgcctactggctgatttctgtactatttctgcatttatgtttcagaaaattggcctaatttttacaactagtttgtgctaaagtccaaagtagaacttgaatccttcacccttctataccagtgaataaatgtgctcattaattagtgcactcatgtgcaaacatatctagtgctcactctaggtgagatcctgtgctgagtccccgcctgctaggagcttcttggtaagaactgggatcctggaagcacagagggccatgagaacccaggggaagagcaagcatgaaggacttgctgtccgctattagcagacactggctggggactagtgctctactgcagtcttaactgagcctcaccagggccctaagaggtacagatcattatcatttccatgttgcaactgtggagactgaggaatgaggggtgctgtgtaacctactcaaggtcccatggttagtaagtgactaaaccaggatccaagcctacgtttctctgacacccaagtctgttctcttaaaaaccatgctatttccctcccagagtcagggatggctgggggtcaccagggaggtgatcatggaagccttacccagggggtgagacttgccagggaggaagccttccccttgagtatggaagggtgattaagagttaaccaagtgaagaaaggggaactgcaaatattctggaagactgcatcagagactgggcaaaagggaatagcactgtcaaagcctgaagaagcaagcaggactcaggcatggaaaaacctttcatgccatgaaaaggagtttggactcctgaaggcaacagggagtcaataagggcttttttcaaaggaggaagctgatcagatttgcattttaggaagctcacttttgctgcagtgtggattggattgaggcaaagctggaagcagagaaatcagtggatgctgttatagtcctaggcaattaattacaaaaagtaacaacagtagatatacaaagtattttttgaattctgctatgttaaaggtatgttgtttcttaagagggggaaacacatcccgaaagacatggttcttgccttatcgaagattagagtctaactgtgcttatcattcttccattactgttctcttcaggtgctcacaaaatcagggcttatggcccactgaggtttggggatcagttttgaggccaagaagaattggaagggaccatgggagtgatgcaggccgacaaatgaacctgtgctgtatccatttcctctccttaaactgcatgttcatgaaaacttctgtgcaacagtcaaaaataaaataaagtaaaataaagattgaaatgctatgtcctggaccaaagtatctcgtcgccacatatcctatttgctatcatttccccaacattcagaaagacagttaatgggtaccatttttctccatgtttagttcttctcgcataaatttccttaagcctctggctgcaattaccacttgtctgctagagcataccagctgatgacaaagggagccaacaatagcaaatagatattaaggggagaacatgaaaacagttgatctgcttggtttgacagcctgttgttgagttttgctgggggaggggattgttcatggtatgtttcctctgggctatgatctgagagcacacatataatagagtcatattttctgcaggtaaaatcgttgcttgctacttctgatgacagaatggaatctatctgctgtttcaggtgctatgcattgagccccaggcatccagatctgccctggccagatgaatttgagttccctgtttaggtcattcggtcacttaatttcctggcatttggggcttgcagtatctcggtgccattacctgagtccagaaatgcaatcccagcaaaatgacttggacttggccgtcccagcccattaacctggggcaaggttggaaaactacacccaacaccaatcagagccagaggcttggacagccatgtgcaagtggaccttggaaagatccctcatggaagagttaagagacttggtgctagttttgttgctactttgaatctaattttcctcatttctaaaaggcagagatccccaaaggggtcaggtagggggaacaaaatgatttcaaagttctcttccagtttaaagactgtaggtttttggaggaactgcctcctgtcggaaggaactaacagcactgtggtccccaattctcaaggagaagctttcttaggagtagccatcccaccaggggagggccctaggcagagggtccctagtagaactctctcctgtaccctcctgagaccacccaagaggacagggttgatgtattaaagaccatgaggctgggggcaatgatgggggagtagccgaggggtagtcagacttactgactgacgtaagtgcagaaatggcaggggatgtgttggggagtgttccagagtgaaaagaaaggaagttctcttgtcaaactcagtgcctggtttcaaaaacaatcaaacaaacaaaaaaacaatccacaacagcaaaaggggaaaggtctttctcattaattcttgcttccgcttattctagaagatgcaggaaaggatttgtttaaaggtctgaattagggttctcaatctcagcactcttgatactttgttgttgggggatgtcttatgcctcgtaggatatttagctcatccctggcctctaccctctagacgccagtagtatccccagttgtgacagccaaaaatgtttccaagatgttgccatatgtcagtgtgtagaggagcataatcacccatagttgggaaccactgctgtcaatggacaatcagtcttttaggaacctcagcttgtttatctcccaaatggaataacccctgttctgctcagttcatagagtaattgaaaagaaccaaacaaatgagaatcttgttgctgtttccgtgaccagggcaagagtgcctgcaacccccaaggctcagaagaaaggcaaacaagggatcggatgaaagggaccattccgttcaggctgtactcagtgactcaggcctgcgctgcttcacttggactgaataatcttagcttgtcttctgcatgtcagacagagaagatgctagacagccagcaggctgtgcaagcacagagtggggcccagcatctatccatcatcaagtaaggctgttttttattaaggagaacaaggagagctcattttccttccatgagagcaatgaggccttttaccaaagcagttcactccttcttgaatcttttagatatgtgaagctgtgaaaatcaaaggcacaggatgttttctttgtggcaggcatgcatgagctaaaccttcaccattggcttcaggatcaccttacgtcccctttctggtggagatcagaggttgctgaccacctacttcaggtcctctctgtggggtgagatggcaggagaaaagctggtgcctctgagcaccaattatgtgaaggcactatgatggattttacatgtgtaaaagattttacatgatcttaatccacatgtaagtcccatctacacttaataattttgaacttacagcctagaaaccgaaatatgacaaagttaagtgacttttgtgacgagttaagtgaggagtcagcatttgagctgagggctgtctgattgcaaagccatctttctttccctacaccttgctacctcttgataaggacactgtttctccaaagaagagaaacaatttccccaagttcacacagatcttcgatggatactcaaaggggctcacattacaaattgtctttcccattggctcaggagagattctgagaacttggagagggccggtgagcaagatggttaaataaatgggccaccacctccatgatgccattctgtggggctactttttactccagaatgcagtaccaacacaagcactgcctgagaactccccaccctattgtcatccctgatagaggagttcaccctaaagcctttcccccccgtcatagacagttaaaaagctatcagcctttcctcacagtcatgtacagtctcacccacacaagtgagttgtgcacaattttggagacattctgtgaccccaacttaaaacacttctcccacacacaaagttaacacttcagttaccaggtgatgattgagcagagattcttttacaacccagagcagtactaggactttgttagacaccctggagtgtatttacatcctaaggagggagaggggaggtggggatggtagtagaggacctctgtgtagagattccttttagcaaagagtctcagccatggggaagaaactcctgggagaaagggctcacccggcctggcaggggactgactttggagggaacatcaactgtgccaggcacagtgctgggcacacatgcattgattcatttcggtttggcttggagacaacagggccaaagggttcacaaagaaactgtgcaagaaatctatatccccatctgtaaagggacaatgtgacctggaccgtctctaagcgacaactccagttccgtaaggacgatctctaagtgtcatcaagatcctgtaagagtcatgggtggcccattaatgatgccagtggtcttctgcagttccctctgaggcaagctgaaggttcaaatggatttaatcgcagcaggaaagaccaacgtgggaggataagaagaaatctctggctaagttctccaagggcagaactcacccacatttgtatcctgagggtctagcaccgagcttggtctagagtggatgttcattaaacgctgatttgataagtaagagggcacatgtggagataagcatatgagtagccaagagacccagattctgattctggatgtaccaacaggtagacgcttaaccttgacaccttaagttctctagacctcagttcctcgtctctaaacttcccttgcaggtctctactttatgattccatgagtttatctctaaaaaagttgatacatttgcccatcgaagttaaaagtctaagatctatgatttgacagctattctggctagaagggaatgaactcaacaaaagtctattctggtgcaatacatcttctaattgcagattgtccgccccagtaaacgtctattgtttgggaaatggggtaaggaggaggcacatttctttgctagttaatggcctagcatcaactccagctgaattttggaggtagaagagtgagtctgtgtgcttctgcactgtaggcatgcatgcatgtcagtttagtgggtggcatgtctacttataagctgatgtgcaggcagtatgcatgggtattggtcatgtgtgcagaccctcaaggtaaacatgtgtggcatttgttggatgtgcgtgtgatttctttctgtacccacatatgtgtatatccatgtgcatgtttatgcacatgggcatactgtgcagcaatgtttctgtgcagtgaacatatatatttagtacatgtggacatatgtgatgaatatacttgcttggaacatgtgcatatttgcatgtctctgctctggctataatggggtctgaggatactgccccaggattccctcaaagtagggaactgtgggtgggggaagcggcttctttacaggagcaagatctgcagaaagagcagggttgtttcacatgtgtctaagctgtgccaacctgcacatttgggtgagtggcccctgtggattgccttaatgatgtgtgtgcacagctgagtcagctggggctgagacctggggacctctgtcacacaagttgccagctcccatttgtcatctgccctgggatgaactttccttgtgggattgtccttccctgtgggtggtgtgtgttagcttgtggttattagtgtttaaaaaaacacgtgctgtctccagagctcagggggactctctctccagtttcctctggttgccaggcatgagcaaaagtaggaggaacctctgacccaggctcctgctaggggccaactgagttagaaaattagacaggcagagaatgctttccttctgagatgggggcaggggatggaagggcatgccggcagcagaaagtgtggccaaaggagaggtctttagaggttaccaattgtgcaggccaagttgctgggggaaggtgaatgagctgacacacgagggagatgatgggaagctgtgagctgctcctgcaaaagtgaccataactggatctgtgctgcagcaggaaagagctggaactagccaactccagactggagaccctgctctgccccctcaactgggtctgtgagttgaagcagtgccttgtggtggggaaagtgggctttggtcacacagagttggacgcaattcttggttctgccactgaatagctgtgtgattacagacaggtgactttgctttccccaagtcccacataaattcaggtatagtaatattataaaccccatatggttgtttttaggatgaaattaattcattctgcaaaatgactataattttacacagttaagaggataattctttggtggagaagtccctagatgcattattcactggcaaactatagatagatggagtgaaaaatctcatgtgtatccacctaggggcttgactggactgagatgatgatgctgatgatggggatgatgatggtgatgacgatggggatgataatgatgatgggggcaggttgagggtggtgctatgtgtttcctgatgcattctgaggattgtgctcccttttctgttgcctgacctaagggaagagatgaaagattgggatgatccccacatctcttggacataactcagaatggccaactctaccaacttctcatgagacaggagtagccaaactgtggctcagataatagctgattcattttgcacaatccaacccaatagttgttgatgctggtgctatgcctggatattaagagattaaaaaatgataaggtccttactcctgagaagctcacaatttaaaaggagaaaagaaaaggagcaaggaagaagggggagagagaaagggagggagaaggaggaagagagaaaaaagtaagcaatgaactatatgcattacattatgataccacaatagaagagtgtacacaaggcactgtacacagagaggtcaggaacagggactctgacatctgactggcctacctcttaccagctgggtggcttggagcaagttaattaatctttctgtctcttagttttatcatctgtacaataggaaaaagcatcaatatcaatttcatgaggtcattgtgagactttaaaaatgtagaaagcatttagaacagtgactgacatacaaataacttacagtgtttgttgttacagtaaaagttgtatggtagcagtagcagtgctagtggtggtggctgtagcagcagtatcagtagtaacagtagtactagtaatgagggtggtagtagtagtaatagtcttatcagtagtagtggtggtggtggcagtagtaatagtgttgtcagtagtagtggtggtggtggtagtagtagtggtagtagtggcagtagcagcatcagtagaagtggtggtgctgttggctgtagtatcctaacaggaagcagctcagaggaagcaggaattgtttctacaccgagggttaggataagctagacacagagggtgtgctctttgagttgtgccagaggaatggtgagtgtgagttggtgtgttgaacaaggaggctagagcattcattcctagcagaggtcatagcactaacaaagtcctagaggcctgagagaccgcgacaggtagttcagggacctgtaagcagtcatgatgcttacagatgggggtgtatgggacaggggtagctagaaggtgaggctgaaacggtggccaggggccgggtctgaaaggctgtgggtgacctactgaggagtgtgggcttgtcttgtagtcacggaggagccatcctgggctttatttggagtgtggcacccaaggggaccccacctaaggaggatagatggagcttgctttcagcggccaagagctcaggcatactgggggattaaggagggtgtgcattgctctctgctgttctcagttgctccttggcagccctaaaattgaagggtcttaccctaaccccacgctcactccagccaaaccaactctagttccccatgccctcggcccctttctgctgctggtcaaccagtgctgtcccagacatgacgtatcttgactagaactctaaaccccaaaggtcaaaattccctaagagtagaattaaaagtcagggtgtaggaatagctctcaatgtcacagaatataatttacagaaggggaaactgagaaggagaagagcaggtgaaaggcaaggtgagagatgatgggactccaggaccagagaggagaacattctgccctgccttttcctctgtcacaggttccatccccaattcagccagtcaacctcaacacctagacccctttccgctcaggatgaagggaagagaagaagaaaaaacaaaaggaagtgagaagtctaggctcagaggcctctggggccactggtgagactcagatggacctttaatgtcattaaatccgaactcttattttgcagatgcaaacgtcaaagctcagagaggggcatgaactgttcgaggcgctgaggtatcatcttaagagaggagtcaacaggattaggtcagttggtgaatccaggacagagctgggattcaaactgacaataatctatcctctgtgatatccaacatatctccttcagaccttctattttgtagatccagaaacttcccttcatggaagaaaagtaactaattcacaattacagagtaaatcaggggaaaagctacaaatatctgggattctgattcctgaacaggacatggaccaagacctataatgagcagacgcctgttcacagtcagcatcttccacagcaaacctctgtccagctcctcaggcttgcagcctgggttctaagtgggaggtcaagaggacctcaggtaacaccttgcagtgagttcttctgggagaactctgagctctagtcatccacagaattctcacaggcaggtggagactctcctctgtctctccctagggccatcttccactctgggccagttgttcaccccagcctctaccctgtttctgcctcgtccttaggtcacctacccagaggtaggcactgggccacagcctttgcatatgttaatttatgcagccaacctgtgagggaggtaaaacaaacctcactctatagccagagaagcacagcgagtaatgcctgaatttccaactcccatgataccaaagccctctctctatactccccagtgtggctgccctgcagggtccagcctggtggctgcagagaaatggctaatgaagggctctgtgctgccagtccgggagcgattccctctgtgctctcaactacagaaatgaattttgtttagttcaaagacctcattaacgctggggttagcgggagcagcttcacagctgattcatcttcaggaatcaaagacagcctgagtccctgtgagcagtcaggagccgccagcgggacatctctgctgctctgtctcacctcccaggtactactgatagcctgcagccaaagcgagaggcctcaggtgcctttcccagaggactggatcatgggagagcagagctctgcacctgagacctttgggtgtcctctgggaatctccagggacaacccatatgcatcgatctcacccaggttctcccttctagacaggttgttgaaggtagtgcaaccattgaaccatgccagacacaaggaggcagatgtgtactgtggttgtagggagacctagttttgtcactaactgtgtgtgtggcccttgagtccctactcagccacatgagtggattgactcagaaattcctcaaggtcccttcaagatttgatattgacatggcccagactgtccaggaacagaaactgccattgaaaagataaaccatattcattcatgtagtcaatatctgctgagtatgtactacatgccattcattatgtcaagtgctagggctgtttaagaccaactgtgtccacacacataaatctcaataatttaaagcagcatgaaataagaagcaaactagctataaaaataatagtgttgggttatgtgacttctacctcaataccataaataatgatagtgaataacatgtccaagttcaaaaagatatgaagggattctccaggctagaagctatagcctcaattcctagttctatagcacaataaaattgattccaatatcaactgcttagtaggcattcaacaaagatttgttgaaagaaccaggaaaagaaaggaggaaatgaggaaaaggggggaggaacaaaggaagaaagttcattaaagagaggcaggcaatattaccgtccatctgttacaagaaagaaacccaagctcaatcagagattaagcagcttgtccagtatcacactgggagcaactgacagaacttatgtgtagagtgagatccctgttggctggggctgcagggaagatctcctgaaggcagagtgagtggagaaggtattgactggaattcaacaaaagcgctggagctggcagtgaaagaggccatggtgacatgggcaggggatgggtttacttattttatttggttattgttttgagacagggtctgccacccaagctagagtgcagtggtgtgatcatggctcactgcatgcagtcttgaactcctgggctcaagctatcctcccatctcagcctcccaagtagctgggaatacaggtgcatgtgctaccacacctagctaatttaaaacaaaattgtagaaacggggcctcactgttgcccaggctggtcttgaacttctgtgttcaagcagtccttctgccttgaatctcaaagtgctgggattacaggcatgagacaccacaccgagcagccttttttatatgccatatatttctcacatagcatcagaagaacttggggacagcagcttggggtagtgtcatctgaatcttggctctgtcacccaccagatgggtggctctgaggaaggctaagccatgatttcctcatttttaacatggagattatggtgcctacattctagatttttgtaagaataaaatgagataaggcaggcataataccaggcataattcttgctcaataaatgggaggccttcaccttcttccctccaggtagaaaggaaggggaagagaagggcaggctgcctagaattcttaagatgggggtataaagtcaagcaaaataagcattaccttcctttctgggtctgatcctctctctagtggtggagtcagtgaccatctatgcagtcagattcaagggactactgtcctttcctcctgggggccagagagcctacccagaaatgggaatgaagtgctggaattattaagaagcctgagtggaacaataacttttctggtcatttctttccaatggttgacttttccatgctttacacaacatgggagttgcttgcttctccctaagaagtcagactataggctgagtaattcctcaagtaaaaaagattggcagctaggaccagaatcatatggcataattatgtagctgagccttccaggacttctcactatgcctaggtttttatttagttttgtttccatagcatgaattgattctttcacagatatatttttgctgccattatgaagctcaaagttaaatagtctatcagtcatgtatgcagatacatacctgctgaggtagacaccagttgaccattcattctgtgagcagaaatgattgtgtaccaaagacatcccacacactgtgctagacgctggaggtacaatgttgagcaattaaggcatgatctctgtctttagcagccttggtcactgaggatctagcacccacactgtgtactaaagtgggagtaaaaatttgcactgtccttttggaaagaattcagtacatatctgtcaatatgtatccagagtctgaaaactattcttttttaacaacaataattcttgaaaagaaagtcacctgagatattaaatagaaggaaaaaaccccgtgtgtaacaggtgggtatttcttacattagtcttattagcagaatattaaaaacaatctcaatgttcaataataaaggagcatatgctttatgggaaagcaggtagttattaaaagccagtataaggaatttcgaataacgtagaaaatatttaaggtacaatattaaatgaaaaacgcagagttcaaaattgtttatacagtaatatcacagctatggaataatgctttttttcacatttatacagtacttttcagctttcagagcagtttcaaatacattccttaattttgaaattcatggcaaccctttaatagaagcagaccaaaggctattattcccattctaaacatgagaagactgaggcttgctgaggtttacgcatctaataactaagaatttcatttgtgttagaagtatagagagtatgagagaattgtatcagagctttatgtaatgcattaaattttctttatgtctgacaccagctcaggaactttgaacagcctacctcttttcttcccatcctttctgcctctgagaggaaggtgaaaaggctatcactgattgaattaaagtaataattttccacaattgttttggtttgctttccactactgcttaagtgtataggaaagttctgtgtgcctttatccaagtacctctatggtcagacatgatgtcttgctacaatagatgcaatatccctgcacagaaaacttcactgacaattcccgcttactcagtttcaagcaatggcaaaagcaactgggagcaggtgggagaccgtggcaaatacaaagtggtatttaactccctgtgcataccagcatgcctccacctttctggtccctcctgcatcaagcagccccttaagcttgatgcttgagctgcaccacgatactgtctgctctctgaacaaacttcacaggtcacaccttttaccagtgttcaaggttttccttcacccagtatactgttcctgtattctctgccttgcaagagcaagaggccccatccttcaatgtccagctaacatgcagcctcttcggtagctgagtcagactcgccatcctctgagttttccaaacattttgcaaaaccttcttttaatatttgtaacacactgtaatcagatttagttacgtttcaagactgaatgttcaggaccagagaatagacagttgcatttagtcctcacaaaatcatcgtagatatagagtatttatttacttcatttttcatatttgcttggaatttatgtccctgtttttctttttgaaattttattttaattgacacataataattatatatatttatagggtatagatgtgatacatgtataccacatgcaatgatcaaatcagggtaatcagcaagatacagatttttaaaatcctaatcttatagatgagaaaatgggtgcaagtaggtattccaggtaaaatagctagtcaatggcagcagtatccatatttgaactcacatctacttatgtgtctgcagctcttcccataatatccaaccaggtcttccatgactgggctaatgagtgaagtggtgaatgagtcaaagatgttccttgagtttccctccccatgcacccatacacacctcttcttttgacaaaggttgtcacaactcagagaagatgccataatggccagccttctagttcactggacagtcagggaatgcaatttactaaatagagagggcagatggtcagtttcttgaccagcggttgaagacttggtgaagaccagtggttcaccaagcagcatgaagactgcccccagctctcagagcaggggagggaggctatctcagatgactcacatgacatcactgcagctcttccccttccagcttaacccaaacttcctgcatctttctccctgagcaaagagccctagagtgttcaggagcgcaagtggcacctgaacagcccaggactggtcctctgacctcaagggagccagcttatagctaagtcaatcagatgatctgtcttgaatatctgtgcttagagaaatagagcagttggaagaagaaaggccacatagcttgcagcagtagcctggccattctgggccacgtggctgagaagccctgatggagagaagactttatcaggtggctcctaaaagggatggaatgagtagctcagccgcagttcacatagaactctggtatgattcctgcttttgaatccatatgatgcttttagccctagaatgggttgcttgtgggtgtcttactaggtttatgtttcttgcaatggagaaatccctgaactaaaacactggggagcactggacagaaaagctaaggttgggaatgacatggccaaacaactgtcagcagactctggaagcattaagcagaacttgtctcccacctcagtggaaatggactcagcatcaactttggagcctgcaacaactgtctgctagggtccattctctcatgattgctaaaaccacaaaggacttgcaagataatccgggccaccatctttttaaattatcctatagtcaggaacttatttcctgctcagttctctgtcagtccatctggtattgtctaaggagaaattctcaaagtggtattaatatgcttccgacaatctctaaacattagctgatttttctttttaataaagaaagaacaaatcttgggcacagagccttggcagacaacaaaaatctagctataagttaatcatattttttattatgctcacttttacatttacagttacctctttttttgttttttttttttttgtttttgagatggagtttcgctcttattgtgcaggctagagtgcaatggtgtggtcttggctcactgcaacctccacctcccaggttcaagcgattctcctaccttagcctactgagtagctgggattacaggcaagcactattatgccctgctaattttgtatttttagtagagactgagtttttccatgttggtcagggtggtctcgaattcctgacctcaggtgatctgctcccttcggccccccacccaaagtgctgggattataggcgtgagccaccccgcctggccagttaccttctttttatggtgaatgataatattttaccatttatgtggtgatttaaagtttccactatacacatatttatggggaaaaaaagtcaatttaaagaaaaatgtcgtataaataatagcgtaggaagcatgcagatatagaacaaatcatgaaagtgtggaaattacctaacatgtgggaaatgctagttaagcccagccacctatttggcaggtgaaacaggggccccgatagggcaggtagttagccagagaccacccaaccagttcctctcactctcttcagccacacatggccctttaagaactctttctacatttattttgtgatgtcaggtattaaagaaaatagctaaccaaagagttcttttaatggtaaaggggacaggggctggggatgaaggtggaggggagactgttctgaatttcccagcagcgaacaggtaccctatgcactgtgtggagtcagcagggtggcaggtgccttggtggtgtcactggctactcattggctaagcagagctcagggagaaacagatcattggaagcttacaatgcagaggcatagtcatggcctacaaaacagagcattaataaagatcacaaagatacacctaagagaggaaaatgagcctttctgtctctgtaaataaatccatggcttgcaaacaaaaacatgccaggaaaaccaactgcaaatgcactcctagtaaaggagaccagatgtccgtggaatcattttaattaaattgtgagtcaattgtaaaccagagggtggggggttgaggggagtggaattttgctttctaagactgccagatgcaaagtccaattttcaggataatgtatccagggtggaggagcctttccaacatttaattacatattgcctagcaactgaagagatgaacaggaatggagtcaggggacctggggtgatccattaggatgttgatgccccaggttgcaggacacacatcaacaccaggcgatggtcagtgtgttgatatggttcgtccccaggagccatgagatggttccaattatgtgaattgtaagccacattttgttccatttccattgggcggatcaacccagtaacctggcagaattacgaccctgtttccttcctttttcacaagagaagcatcttttctttctgtataaagtaatagatgttgttaaaaattcaacagtacagacatgcataaggcagcaagtgaaaatgtacctgccaggtacagccactattaacatcttggagcatatatttccagaattttccagtcataagctaatctcccttgttctaacctaaatgagatattactgtacatattatttcataatctgctttctttcctctaatctatggtggatgctctttctaaaaaacgtttgttttttgatagcattgggagatatacctaatgctagatgacacattagtgggtgcagtgcaccagcatggcacatgtatacatatgtaactaacctgcacaatgtgcacatgtaccctaaaacttagagtataataaaaaaaaaataaaaaaaaaaaacaaaaaaaaaaacgtttttttattgaactatgtcaaacatatggaaaagtgcacagataatggaaccaacatggagaataatatatagacttttaccagctccctaccaccaagacatactttctattacttcttcctaatcactattttcttccttctcttcaaaggtaactattctcttgatgtcaaataaattaattttgcctaactttgaacttcacatataatgaatcatacactgtattttgttttgtctgatttctttgctcaacattttgtgaaatccaattgtgcatttttatgtagtcatagttcatttttatttttatagttttgcattgtatggttacataataattgatttatccattccaatgttgatgaacttttaggttgtctacagttttgagccattacaaatagatttttatgcattcattttggtacacttacaagacacacttcttagttatatacctaggagtgaaattgccacttttctgtaccaatttacaccccaacatcagtttttgaaagttctcaaatttgtcctttttaatgtctgtattatgtcaaattcatcgtgtgctgaattatattccattgtatggatatcttcatagttttctattgatgaaaattttgattgttttcaaccccccacatatttttttttgaaaaaacaatgcttccataaatatccttgtacatttatctctgagcacttatgtgattattccttaggatgaattcctaggagtgaaattctgagagtcaaagagtatatgtatttaaaatgttcatacttccaggtttcttaagttaattttattcaactctctgattctttcatctgtgtttgactctcatctttctggttgctgccttgaacacactccaggtaccaatcgtcccataaaatgtaggatccctgactgatctctatatgtcaggcaaccttgaatggattgagtgaggaagtggggtccagagatgccatagacctacagatggagatcacagttcacaaaatctcctccagggcctaagaagaagccagtctctgaaatgtgcttcttggattttgtctgaacatctcactagcctaaagcagaagaccctagacttaaagaagctcattcattcatttggatcccaatgatttctgaattgtggtcccttggacacatcagtcatgcaggaaaaaaagaatatgtaatgtgaatgcagatgttcagacactaattgagggccatgtgccagctactgctgcagacgttgattatccaaccacagttggaatctgggaaacagagacttaaggcagaagttctgcaatggagatatggcatggtatatatgtgtagaggagggaacaaacactttcaaaagtatcagaaagagcttcatagaaaattttttagattttctgctatatctgctatatctaaaaaatatttttagattttcaggctggctgaagtttccccagtttaaaagtaggatatgaatattatcaacaactcctctttcctgatcccctgtaatgcaccaggatcttcacggtaatgatttatttatctctagaattttcacaataactagatatatttattattcttccctgtttctcagatgaagaatgtaaggctcaaagagaataaaatgaacttaccaaggttgcacagctagtccaggaagagtaagattaacaatcatctccatccaattccaaagactgggcccttttgccaaccacaagacattttaacaaaaggcaaagcaaaagttcaattaaggaggctatgagggttatcacagatgcaggcaaggggacacaagggaaagactgcctgtctccttcagggggctgaggttctactggggagatttctctccttgggtaaatgcagcagtgttttggagccccacgaagaggcctggtttcagctgctctggcaactgcttgagggcttctgctgtcacaggtagaagacacaggggttctttttctgggatcatgtctatatctttaccttatcaaggcagacaggaaagtgcaaaaagaaatgtgaatgccccagtcacaccagagatacagcactgctgtcaccctctgaaagctaagcagggacatggggtttagggaccacgatgtcagtggcttcttcccaagatgatgcatgcaagtggcaaaattcagacttgaattcacatctcctggttcataatttctgtgtgagaaggtttttctgcagtaagtcattgaagccatttgatcttagcaagagctaggaacatttttttttctctctgagcattagaaatcataaatgtatatactaatcaaatctcagctataatttatttatgtgcccaaaaactatttatggcagggtcaacaaatgtatgtgtgtgtgtgtatgtgtgtgtgtgtgtgtgtgtgtgaaggaagagataataaatatttcagacttacaagttatacaatctctgtagtaactattcaactctgccactgtgggatgaaaacagctatagatagtatgtaaaacaatgggtatgcctgtgttccaatgaaactttatttacaaaaataaatgacatgaaacaactagatagccataagcacaagaatgaagtcagacccctacctcacaccatttgcaaaagttttaatgcaaaatggatcatagatttaaaatgtaacagctaaaaatataaaactattagaaaaaaatataggcataaatctctgagcccttgggttagagaatgttttcttagatatggcactacaagtacaaggaacaaaagaaaaaatagattggacttcattaaaattaaaacttttgtgcccaaagggcaccatcaagaaagagaaaagaaaacccacagaatgggagaaaacttttgtaaatcacgtacctaatcaagtacttgtatcccaaatatataaggaactcttacagatcaacaataaaaataaataaataaaaatgtacaaaggggccaggcattgtggctcatacctgtaatcccaccactttgggaggccaagatgggaggatcacttgaagccaggagtttaagaccagccagggaaacatagtaagaccttgtctctactaaaaattaaaaaacttagcctggcatgatggtgcatgcctgtagtcccagctaactgggaggctgaggttggaggatcacttgagcccaggagttcaaagctgcagtgagctgttatctcagcactgcattccaccctgggcaacagagtgagactctgtctcaaaagagaaaacaaaacaaagcaaaacaaaggatatgaatagataatcctccaaggaagatatacgaatggcaaataagcacacgaagtgacgctcactatcattagctatcagtaaaatgcacattgaaacccacaatgaaaatgccatttcacaacctctagaatagctataattaaaaaaaaacaaagaatattaattgttggcaaagatgtggggaaattggaaccctcatacactgctggtgggaacgtaaaatggcacaagtgtttagaaaatcaacctggcagttcctcaaaactgacccagcaagtccgcttttaggtatatactcaagagaaataaaaacacatgcctacataaaacttgtacctgaatgttcatagtaccattatttataatagtcaaaaagtagaaacaatctaaatgtccatcagctgatgaatgaataaattaaatgtggtatacctacatggtggaatattattcattcataaaaaagaatgaagtatagatacatgctgcaatatggatgcacttctaaaacatcagctaagtaaaagaacaaagttagaaaagaccacatatgttatgattccatttatataaaatattgggattaggcaaatctgtagaggccaatggaaattaatggttgcctatggctaagagtgagaagtgagagaaaactgggcagtgactgctaataaattccttttttgggataataaaaatatcctaaaattgattgtgataatagttgcacaactctgtgtttatactaaaagccattgcactgtgcactttaaatgagtgaattatgtgtaatgtgaattatatctcaataaaagtgttacactgaaaaacaaacaaaacaccagatggcaggctgtatttggcccaatggctgtagtttgccagcccctgatttacaggatgtcaggtatagtactagacacagggagcatagcagaaaaaatgaaatgcatctcttgctctgatggagcatagtctagtgataaagacagttgccaaacacagaatcatatctaattgataccacattagaaaccgtaatagatgcttcagataaaaaattcagccgagagaggaatggaccaagtcaagcaaagccttgtgggctgtgatgagaaattctgttttttttttttttttttttttttttttgtctaagcacttcatcaaaggctctctgtggttgctgtttggagaatgggtttgggagagagaaagaacgaacacagaaagaccagcaagaagcagccagagatcccttgataaagtgcttagacaaaaataataataataaatttaaaaactagaattcctcatcacagcccacaacactttgcttgacttggtccattcctctctcagctgacaggcatttagagggtaggacaaaaggtcatggtggtgggttgaatttggtgagggtacgggaggaagaattcagggtgccaccccagttttctagcttaagcaggtgagcagaggaaagtacaattttcggaatctacttgttgggatgagtgggtgggtgtggggagaaaagtctcaggccagagcctcttagaaatagggaaagggagctattcactaatcaattctcatatatttgaggttcacctgaaaggtctaagtgttgacaactcttagaacagatcttctccatctgtgcaattgcaataataaacttaccttgttagatgattacaagggttaaattaattaatattgggaaaacttttagaacaatgcctgacatatgtaggcttaatataagtgctaaacataataaactctgatggctgcttcagtaggaaggcaggagctagagagataagacctttgccttgcaaactgtcctgaatgcgctttgcttgtgcccaccccaccccctgagatgctggcatgaagctgggcatcttggcttcagccaaatcagagtgggttttccttttgtgcaagatgtgagatgccatgatcaagcacagagtgactgtcccctcctcctctcccttcctcctgcatgggcactgagcatccagctataggctctcccggatagatgccagattccttctagttcctgtgccctaggaggatggaggagttcagaagctgaatgaggctggggcactcagagagggtggacatcacagggcggagggagaatcagactgcagcaagttaacaccttgaagtcattaaaagccctctacaaatggaaagtattttgggcagcacttgaagaaataacacacataaagctaactacctgcggcaaggcagcagaggcactgccacaccctccagcttctctccacagtgtcaaccccacctccttctccctgctcatcttcactttctgactttcccagtttccaggatggacaatgagtggagaaggtcctggcgggcagggagcggctaggaaggaaggaggggtgtgtgtgatgcttttctccaagcatatacccttgtcttgctcaggatctggagagaggaccctcccaccctctccattctagtctaaaggtgtcttctctcagggcagcctccttagtaaggtggggacctttgtgtcctcagagtcctcagaaggggactttgccacctgaattacgggaggaggagggatgacagctaccggaaagagggaggctgatgaattatgtatggctggaggtgatagtaaacagtctctggatgatgagctggcggcagacaggcagcactgggcgctgagtcatggcaaagggggtaattagtctgtcagctgtacacacctctgggtggggtgaggttttgggctgagtcacactctgcagagggagagagagagagcttggacctcagaaaaacaaggagggggctcatgttcttgatgagccatgctgttcttgagatccctctctcctcccacttgcaggctcaggcccctccgccaccctaccctagagtcaccatcccatctcccttgcaagtgactcgcctggaccagccagatatcagccaggagggcattaggacttccctcccctcagcagagagggggtgtaaatagtcttctgttgcttcctgtgtttgaggtccccctttaagcccagcctgagaatcttggagctgagcctgaagcaaggagtggggatgacagaccttacgccacagaacatcgggccacagaagcccaagatagagggaagccaagaccctacacacagcctgaaccaagtgtcagtctgaggggtcaggcaggaagatgagcaaagagatggagacaccaagatggatagatggattggctcaatcattcagtcattcaacccgtatgtggtttctgaggactgttatgagccaggtattccttcagattctagtgatacagagctcgacaagagagctcagacacctattctcatggaactgttagagtcagcagatattattagctagacctgagcagcaggggcagcccttgagaaaagggaggtctggagaatctcacaccccagagatcacctgaaacctgcaagctaggtatgagcagaggaggggaaatacctatgctggaaggaacaccccttaagacccccagtaatcgctcacccagcagttcacctgtcagtttgtcgctagctacatgctgataaggaggagacgagggcaaaggagaaattccttagagatacagaggcacattaagtatggatctgaccactatacaaccttcctgggtggcggtaatgagcaatgcagccataaggcagcactggtaaccaatacctggcccacgcatgggcaccagcaaatagtaaaggagggttccacaagcctggggtgggaactaggcaaggggaaaggtggggactgaaggcagaagcaggaaaactagaccaagaaaaaggcagagacttaagacagagacaagaacttcaagaaaaaatctgacatcataaaaacccaacgcagaactcctgggctgttgccggcccattctccttcatcagcccactctgcctcatctttcagagtgtactatctctctaaataaactctttgctctccattttccttcaatacattctttttttggctaaactgtctcttggtcaaaatctttctcccaagacgacaaagataaggattatcccccttcccagtaacagaacagtatgatgaggagacagacaaattacacgtaagccatgaacacacaaactgacttcagagagtgataagtgcttagcaggaactagaatgggtgattgactggaggaaagcctacttaagctacagtggtctggctcatgctgagtagtgagtcaggacaaaggccaagaccttctgctttgtggtggggattcctctctctatgtccttgacaggcattgtggtgtagagaaaaagtcagaaggatttgggatcattcttgaggccatcacttactactgtgtgaccttgtataggtttctttacctctctgagcctcaaaatccttatctgtaaaaattgggtaataatatagatttcagtcttataaagaattgttgtaaagattaaaacggggtaataccatgtacaaaagcacccaatgcaaactttcaaaactcaggcagaagtaggattcaagcccatgcctgtctaaccttgtgcatagttcatcccacccccaggtactagtgatacctccagagagaatgagaatcatgcccgaccgttttggtgcctagaagcagatgcctcaagctcccctctttgtgagagaatagtctatggccccaactcccttccactggtcttacctctggcacttaggaggaaggggctgaaacctatgtcatagccaggcagctggggcttcctgcctggaaccagttctttcaggctgaattctgcttttagtctttctcatctcagaagactttgagctaatggcctggagcctgggttttagccccacgtcttcgggcttggcctctcctaggttctaatattaatcaaattgcactactcaacttcaccctttctcctaggattcggtagaagtgaccatctagcgatgccctggtgaaaagagagaatgttgcctctgtcacagctggctgggcccccttggctccaagaactccttagaatgtctattttacccttcttggagctgaccatacgagcagaagggatgaaaggactttagacctctgcttcaactagggctgccggataaaatacaggacatcaactaaattttaattctagataagcaataaatatttttagtataagtatgtcccaaatattgaatggggtatacttatattaacaattatttgttatttatctgaaattcaaatttaactgggtgttctgtattttcatttgctaaaccaagcaaccttagtctgaagccaaccattcttcctgccgtgtcctcttgacctcgagccccagttctgataatggcttaacctcgtctggaactgggccttgcccccagatcagaaagatgcaactttgttcccctgccactgagctgctagatggtaacccctttcttcataccccaaacatcctgacttcctctttctatcaccgtcctactggcatccccaccctcctttgctggcctcatgccaatctctgctggccagtgcttctcaatagttcctgttccacagttctccatcactttgttccactgcctgaagttacctctggtgggagtctcctgttgctgatcaccacatgctttttgagtatctttttctaaccatgtggctggctgattaccggggaccacacctatgaccagtcttgcccctccttcccagcagtattcctgtcctgataaaattaactgccctcccccatcttgtcccatgacaagctccagtgacaaagctccaaggcagctagtttttaagctccaagagggcagggatcatgcatttgagccaatatctactggagctattcacctggagagccaaagggagtccaggaatgcgggaataatgcagggattggaatgtcagtgctgtggggagttgatgatttcccatggagtggaaaaaagtgggctcaatcacttaacagtaccagtccatagtatatgctcagttaatatttgctgaataaatggaaatagaataggaaactgaggctaacacataattggactcattattgttaaaaatagaagtccccctgatggatgagcagagttttccagaatactgctggccaatttcacccagatcgccatcccagcatcctcttgctgcaaatgctttttataacaacacattataaactatgtagttgctttggcaaaagtggctcaaagtgagagaactctcaaaagacagagacagctgaaaatgaaaacagaaggtttttaggccactgcccctcccagcagaatcctcggtcatatatgggattttgtgtctcctttacttaacagccactcagtccccaaagccccatttcagagactttggggagccaagttcacctctgaacttctgggctagtcattttcttgctcctctccttaaatctttttcctgacctgccctccccaacttctatctgtgcactaagaagatgcttaatgaatatggcagaataaaaactcttggctgtctcatttcactcaagccaaagtgcttgacccacaggaaaatgcttaactggatggattttttttttttaaagaacaatctccttgaaagggtaaaggacctaagagtgagtgctataatcccagcttttgtaataccactcaatggaggtctctgaattccagtaaagagcagtgaaattttattatcacaaaaaaggagaaaaatgtttcaattagaaaaagattctcaattgtgctactttaaaagaaaataacttcatatcaaacatatttaaaataaaaaaataaaaatgggtctaaacgagtagaggagcatattattcaaagtacttgggatcgagattcaaaggactttggttcaagttcctgtgctggcacttactggctctgttatctttgtttctttgtacctctgcattttcatctgtaaaacgggactacggttatggccttctgtaacaccatagggacacagtgagaatgaaatgaaacaggaaaggttaactcatttcactccttgagaagttatgcgaagagaagaggagtcttagtgtcacccacatggaattgcccaccttggaagactctccagaccttgttactgtgggtgcctaggatacctggtcacttggtgcatgatgtggttacaaaacaagacttcgaagatccctttgaaaccacaatatctacgattgagcaaatgttttaaaaataactctaacaaaacaaacttgagtaatttatatttttgagctccttttctactaaccatttaccagggaccaccacttgattgtactatctccatttaatctgtccaacaactctgtgaggagtataattactgtcctcattttataaataaggaaaataaatcacataaaagttaagaagcctccctcacccacacagagctcagagtccagcagtcatctagaatttgaaccaagtctgcttctcatgctcagttggatggaaaggaagtagagcaagtccagtccagcctcacaagtggactgtggtatctaaaggacagatgatatccatgggcttctgcagaactgattctactgattctccatgcatccagctgagaacttcagcttccctcgaaatgttcctgtcacccaggaacccgtgcattacggatggaatctgagtttggcacgcgttcaggttacttttgctttcctgagcctgggagcagagctctctgttatttctaagctcacaaaagtccaggaatgtgtgctttgccacagcaaacaccaaagtgtctaaacaattacaataggtaatagaaagctactagtgaggccaaggcctcacatttcttaattattttctttttttctccacagtatgatatgctgcatgtgctgaataaaagtctgatgaggtggtggagccaagatggccgaataggagctccagtctacagctcccagcgtgagcaacgcagaagatgggtgatttctgcatttccaactgaggtaccgggttcatctcactggggagtgtcggacagtgggtgcaggacagtgggtgcagcacaccgagcatgagccaaagcagggcaaggcatcgcctcgcccgggaagctcaaggggtcagggaattccctttcctagtcaaagaacagggtgacagacggcaactggaaaattgggtcactcccaccctagtactgtgcttttccaacggtcttagcaaatggcacaccaggagattataacccattcctggctcggagggtcctacgcccatgcagcctcgctcattgctagcacagcagtctgagatcaaactggtgaggctgggggaggggcacccgccattgcccaggcttgagtaggtaaacaaaacagccgggaagctcgaactgggtggagcccactgcagctcaaggaggcctgcctgcctctgtagactccacctctgggggcagggcacagccaaacaaaaggcagcagaaacctctgcagacttaaatgtccctgtatgacagctttgaagagagtagtggttctcccagcacacagctggagatctgagaacagacagactgcctcctcaagtgggttcctgacccccgagtagcctaactgggaggcaccccccagtaggggcagactgacacctcacacagctgggtactcctctgagacaaaacttccagaggaacgatcaagcagcaacatttgctgttcaacaatatccgctgttctgcagcctccgctgctgatacccaggcaaacagggtctggagtggacctccagcgaactccaacagacctgcagctgaggttcctgactgttagaaggaaaactaacaaacagaaaggacagccacaccaaaaccccatctgtacgtcaccatcatcaaagaccaaaggtagataaaaccacaaagatggggaaaaaacagagcagaaaaactgaaaattataaaaatcagagcgcctctcctcctccaaaggaacacacctcctcaccagcaacagaacaaagctggatggagaatgactttgacaagttgagagaagaaggcttcagatgatcaaactactctgagctaaaggaggaagttcgaacccatagcaaacaagttaaaaaccttgaaaaaaattagacaaatggctaactggaataactaatgcagataagtccttaaaagacctgatggagctgaaaaccatggcacgagaactatgtgacaaatgcacaagcctcaatagccgattcgatcaactggaagaaaggagatcagtgatggaagatcaaatgaatgaaatgaagcaagaagagaagtttagagaaaaaagaataaaaagaaatgaacgaagcctccaagaaatatggcactatgtgaaaagaccaaatctatgtctgactggtgtacctgaaagtgatggggagaatggaaccaagttggaaaacactctgcaggatattatccaggagcacttccccaatctagcaaggcaggcctacattcacattcaggaaatacagagaatgccacaaagatactcctcgagaagagcaactccaagacacataattgtcagattcaccaaagttgaaatgaaggaaaaaatgttaagggcagccagagagaaaggtcgggttacccacaaggggaagcccatcagactaacagctgatctcttggcagaaactctacaagccagaagagagtgggggccaatattcaacattcttaaagaaaagaattttcaacccagaatttcatatccagccaagctaagcttcataagtgaaggagaaataaaatactttacagacaagcaaatgctgagagattttgtcaccaccaggcctgccctaaaagagctcctgaaggaagcactaaacatggaaaggaacaaccggtaccagccactgcaaaaacatgccaaactgtaaagactactgaggctaggaagaaactgcatcaactaacgagcaaaataaccagctaacatcatgatgacaggatcaaattcacacataacaatattaaccttaaatgtaaatgggctaaatgctccaattaaaagacacagactggcaaattggataaaaagtcaagacccatcagtgtgctctattcagaagacccatttcacgtgcagagacacacataggctcaaaataaagggatggaggaagatcttccaaacaaatggaaaacaaaaggcaggtgttgcaatcctagtcactgataaaacagactttaaatcaacaaagatcaaaagagacaaagaaggccattacataatggtaaagggatcaatgcaacaagaagagctaactatcctaaatatatatgcacccaatacaggagcacccagattcatgaagcaagtccttagagacctacaaagagacttagactcccacacaataataatgggagactttaacaccccaatgtcaacattagacacatcaacgagacagaaagttaacaaggatatccaggaattgaattcagctccgcaccaagcggaccttgtagacatctacagaactctccacccaaaatcaacagaatatacattgttttcagcaccacaccacacctattccaaaactgaccacatagttggaagtaaagctctcctcagaaaatgtaaaacaacagaaattgtaacaaactgtctctcagaccacagtgcaatcaaactagaactcaggattaagaaactcactcaaaactgctcaactacatggaaactgaacaacctgctcctgaatgactactgggtacataacgaaatgaaggcagaaataaagatgttctttgaaaccaatgagaacaaagacacaacataccagaatctctgggacacatttaaagcagtgtgtagagggaaatttatagaactaaatgcccacaagagaaagcaggaaagatcaaaaattgacatcctaacatcacaattaaaagaactagagaagcaagagcaaacacattaaaaaactagcagaaggcaagaaataactaagatcagagcagaactgaaggaaatagagacacaaaaaacccttcaaaaaatcaatgaatccaggagctggtttttttgaaaagatcaacaaaattgatagaacactagcaagactaataaagaagaaaagagagaagaatcaaataggtacaataaaaaataataaaggggatatcaccactgatcccgcagaaatataaactaccatcagagaatactataaacacctctatgcaaataaactagaaaatctagaagaaatggataaattcctcaacacatacaccctcccaagactaaaccaggaagaagttgaatctctgaatagaccaataacaggctctgaaattgagggaataattaatagcttaccaaccaaaaaaagtccaggaccatatggattcacagccgaattctaccagaggtacaaggaggagctggtaccattccttctgaaactactattctgatcaatagaaaaagagggaatcctccctaactcattttatgaggccagcatcatcctgataccaaagcctggcagagatacaacaaaaaaagagaattttagaccaatatccctgatgaacatcgatgcaaaaatcctcaataaaatactggcaaaccgaatccagcagcacatcaaaaagcttatccaccatgatcaagtgggcttcatccctgggatgcaaggctggttcaacatatgcaaatcaataaacgtaatccagcatataaacagaaccaacgacaaaaaccacatgattatctcaatagatgcagaaaaggcctttgacaaaattcaacagcccttcatgctaaaaactctcaataaattaagtattgataggacgtatctctaaataataagagctatctatgataaacccacaaccaatatcatactgaatgggcaaaaactggaagcattccctttgaaaactggcagaagacaggaatgccctctctcaccactcctattcaacatagggttggaagtcctggccagggcaatcaggcaggagaaggaaataaagggtattcaattaggaaaagaggtagtcaaattgtccctgtttgcagatgacatgattgtatatctagaaaaccccatcgtctcagcccaaaatctccttaaactgataggcaacttcagcaaagtctcaggatacaaaatcaatgtgcaaaaatcacaagcattcttatacaccaataacagacaaacagagagccaaatcatgagtgaactcccactcacaattgcttcaaagagaacaaaataactaggaatccaacttacaagggatgtgaaggacctcttcaaggagaactacaaaccactgctcaatgaaataaaagaggatacaaacaaatggaagaacattccatgctcatgggtaggaagaatcaatatcgtgaaaatggccatactgcccaaggtaatttatagattcaatgccatccccatcaagctcaatgactttcttcacagaattggaaaaaactactttaaagttcatatggaaccaaaaaaaagccctcattgccaagtcaatcctaggccaaaagaacaaagctggaggcatcacgctacctgacttcaaactatactgcaaggctacagtaaccaacacagcaaggtactggtaccaaaacagagatatagaccaatggaacagaacagagccctcagaaataataccccacatctacaaccatctgatctttgacaaacctgacaaaaacaagaaatggggaaaggattccgtatttaataaatggtgctgggaaaactggctagccatatgtagaaagctgaaactggatcccttccttacaccttatgcaaaaattaattcaagatggattaaagacttaaatgttagacctaaaaccataaaaaccctagaagaaaacctaggcattaccattcgggacataggcatgggcaaggacttcatgtctaaaacaccaaaagcaatggcaataaaagccaaaattgacaaatgggatctaattaaactaaagagcttctgcacagcaaaagaaactatcatcagagtgagcaggcagcctacagaatgggggaaaatttttgcaatctactcatctgacaaagggctaatatccagaatctacaaagaactcaaacaaatttacaagaaaaaaacaaacaaccccatcaaaaagtgggcgaaggatatgaacagacacttctcaaaagaagacatttatgcagccaacagacacatgaaaaaatgctcatcaccactggccatcagagaaatgcaaatcaaaaccccaatgagataccatctcacaccagttagaatggcgatcattaaaaagtcaggaaacaacaggtgctggagaggatgtggagaaataggaacttttacactgttggtgggactgtaaactagttcaaccattgtggaagacagtgtggtgattcctcagggatctagaactagaaataccatttgacccagccatcccgttactgggtatatacccaaaggattataaatcatgctgctataaagacacatgcacacgtatgtttattgcggtactattcacaatagcaaagacttggaaccaagccaaatgtccaacaatgatagactagattaagaaaatgtggcacatatacaccatggaatactatgcagccatgaaaaatgatgagttcatgtcctttgtagggacatggatgaagctggaaaccatcattctcagcaaactattgcaaggacaaaaaatgaaacaccacatgttctcactcataggtgggaactgaacaatgagaacacatggacacaggaaggggaacatgttgtggggtgggaggagaggggagggatagcattaggagatatacctaatgctgaatgacgagttaatgggtgcagcacaccaagatggcacatgtatacatatgtaacaaacctgcacgttgtgcacatgtaccctaaaacttaaagtataataataatattaataaaaaaagtctgatgaatgaatgaatgaatgaatacaaaacagccccaagtgggtcaattggcctagctccacacaagattgcagattttgcttctagcaccatccaaccaattagcttaaaactgaacttgtatccaggaagaagcaggtggggaatcatgtagttgtttaatggcagttagaagattgagtcaaagcaaatggatctgtagactcatcagatacagaaagactccatacttccccctttccacaggctgcccctaagcagcctcatctagtgccctgtcttgagccacactcccacacagatgaactccaaatctgttctagccccataacttctcttctcagccccagatgcacatgtcagttgcctgctggccatctcctcatgaacggcccacaagtaccacggaccctgtaagaacaagactcaaggcttaagatcacattcccttctccctgccccctcaaccagcatttcctgcatcccctgaattcatgaatggacctctatttctgtaaaacaaagaagaagaacaataacaacaacaaaaaccaacattcacacatatttaacacttattgtagtcaatgcactgtgcactatcttgcaacaattagatttttttttgcacggatgagcaaatcaaagctcagataggtgaagtaacttgccccaggtcacatcattaggaagtaagagttgagattcaaattcagggagtctggctccagagcccaatgtgtagccacgagactatatagaacctcaggcaccatggtggatattccttgtttgcaaccgcacacctatggtcatggccatttccctgcctctctgtgtccggcgctgggtgtcaggaggctgacctctgcaccattccatctgggctctcttgctctttggctgaagattggttgtggccagtgggagattagaaggttggaaggcagacaggtcaggatatttatttccccaaccccaacctgctccctctctgcctcactctcacactagcaggagctgaattctatggtgacaactcctccatggctctgggaacgccatttccctatattactccttcaggcctagggatagtgatagttcccactgttgcttgttcctggatgcttctccatagttatcagttccctgatccctgcttatacctctgtaagtagccctttccttctttttatctgctggatcctgatggattcagactctgaactttagtggcagctaagatgtcttcctcacaacatgccccacatcccagcattatgaaaaccctaattctgtccttggagcagcttcagcattttgttctccctctctatccctcctgctctgccttacactacccccttagcttcccacttggcctccctccatgcaggctcttatatcttcaatatattggccacaacattcagataccccccaccccatccccacaccccctaagctagattcactctttgacttgcctcttcaaaacccttcaatggttccctgaagcccaaagaatataatcaaactctgaagcccacagtagcttttattcatttttgtatttctcccagggcctttgcctgcattcagtaaatgttgtgttgaatgaagaaagcattatcattacttggggagttccgacaaagtgtaaagcacagggaaacaggactgcagtgagaacatcctcaaagattttataatcacaaccagtgttgcagtccccaaatgagcagcttcaaaaacccttcaaagcctcatctatttttgcccttgccccctacttaccagctccactgcctgcgcacacagtagagtttcaggcctctctccttcctaacagggaggcaaggttgtgcatggctggtagcacaggctggtgtcaaactgcccacatccaggtcctgctgtcctgtgtatgtaaataaattactggacctctcaaagtctatacttttccgctgtgccactctgctacactcaaagtctatacttttctctgtaaaataaggacaaaaatagtacttacctcataggattttcgaggggactaaatgtgtgatactaatagattactaagcacagtgttaagaacaaagcaagctctcaaaaacgtgatcaggtgttaccatctaccctattatagggcaggattattatattacacattactatgtctattgtataagctatttgtttttagcagtacttatacatagacttttaaatttaaaccttcccagaatactgagatatatcattagctctactttgcagaagaaaaaaatgacatacagtaagttatgtgtcttgcttgaggtcacaccatcataactgctggagtcaagcctggaatatgggacttctgactcaaaaatatgctattcttctgtgtcctatgtgctatttatgtattattatgtccaattaaaagtcagctcacttttcaaggcctaattcaaatgctccttcctccatgacatcttccttaattccttaggagggatttatcagtttttcttctgcactctggaagcatctcaattatagacctgttcagatgaactgaagtcagtattcagatgaactgaactcagtagtgtattatccttgggaattttcatttctggcttcttcactcaactatgattgctttgaggacataacttctgtcacattcataggtgcaatctcaatgaccatctcagtaccttgcataaagtagacagcaaggcaataaatgtgcagcagaatttatcagtcaggatcaataaaaacataaacagttatgttgcagtaacaaacaatcccaaaattttagtggctttccaaaaaaagaagacctatttctcacttattctatctttaccttgcaagttccatcatctttgttttgggaccctggctgaagagatggacaaagggaagatggtagaaggcacagtagcccttagggcttctgcttggaaataatatacatgcttctatccacatcacatctcattggccaaggtaagacacacgaccctttttgatgtcagggggcagggaaggtaacattcttccagagagggattccgatcgtaaaggaacagaaatcggatcagaaagagcaacagtgaatctggaaactggctccatttacaaggaaaccaacagctagttactgagaaggctgtgatgaatcagaagtatcttacacagtctgacatgcaatcctcattcaaacacacacacatatacacacacacatgcccatgagattacagattagtttcagttgtacaggcaaagaagcaaaggcttaaggaagttaaacaaatatagtaagataacatagaaaaataataggacccagatctgacttgggtctaagtcactccaaactcactttctcctaaattacactgtcctcttagggttttgaggctcctaattagaatacatcagtctttctaccaaaaaaaaaatggagtaaatccttagtacttgacgtgtttcccttgaaacagcagtattggcatcatgggctagacatgcaggttcagacttcaccccagacccactggatcaaaatctgcatttgaacaacaccctcaagtgatttgaaggcatattccaaattgagaagcactgaggtagataccaaaggcagaaaacaaacaaacaaactaacaaaaaaaacaaaaaatgcatttttttcccatcttgacttggaatcagggagcaggagagagccgactgtggtgctacctactgtttgaaaacctcatcaagttaattttgttgaaacaggagaaaacgacataaaacctgttcctagtacccatgtgggagaagcattaacagatgctgccaaaagcccatgaccttaattgtatcttccaacactttgcctaattccctgaatctcatcattcactctacattaattaagacctcaaacatgcattgtattgtgtactgctacgtaccagaacagtgccaagcactggacatgatgagggtctctgtcctagagtggcttactgtctagaagagcgagacagtataaaaatggatacactatgatcagggttcatcaaagagtcaacaatgctctttggggtcctagaagaagaaggcactgtattgaggtatcagggaaggcttcctggaggatatacatgcaggaggaggtcttcaagatgtgaacaggagcttactgtgcaggggctgggaagggacttgtagctttaaggcagcacccagcaggtcagaggccactgaggcagaaaagcaatactgggtatgactggtgctttgggttggtgtgcggagaggtgagaccttttgtggttctgggtgtacatttctagaagatttaagtgttggtgccttatgggatgaggagttcttgttaggaaaaatcaccgggtcagcacctctctaggtgtctcagttttgatcacctgtaggctcagaccctaccttgtttctgagctaatctggaacactgcagggagcagttttagattttttagtgtagcctttaaaagaacattgttttaatctagagcaaatatatacacagacagtccttgaattgccatggttctacttaatattttgactttaggatgggtttatatggacatagcctcattgagttcctcagggaactccttacaacttaggatggggttatggtttctgccgattttgcatgttgctttgtcaccattgtaaagtgaaaaaattgtaagtcaaatcatcctaaatcggggcccatctgctgtgctgaccacattaaatgcattttttacttacaatatttttgacttatgatgggtttaccagggatataaccccatcataaatggagaagcacctatctatacatacatgtaatggttaaacagatggtagtgtgagagtacagagacagaccacctaacccagcttattggggaggtcagggaaggcttgcaggaagatgtgatgactgagatgaattgtaaaagacaggtagggtgcagtgggaacaaaggcccagcatagcaagtgtgggggtgctgcaagctcacatggctggaatatgaagtcagaggtaggagcgagtggttcctgagcatcataagattccaggacttcttctgcttaagtggtggaagctgttctccacctcctaaccctaaccttcccactctgtaccccaatttggctccaaggctggggactcccagcagcaaggacaaaaagaacattactgaccacgtggagcatcaggaaggtgaagaccagaaggggagagcgctgttgaaaatgtgatgctggcagggaccggggtgtggtgagactgctttagaagaacccaggggccaaaggagtgagtcatctgcccaccagcctcttagtcacaagtgataatgtaggtgcccctggatgagaaggcaattaaaatacaattaacctccctgaactgcagttctgagtgcacatcagaaagagatttggagatcattaaatatggggctgtgagtggaggggctataggataagggtggcaggagaaaaacctttctttgaggtcattggctacttttgtggttctctcccacaatcggtccacagtataataacgtaggaaccattgcatgggggaagcagagggacccaaaagaatttcttcctctcttcaatcctccctccccaggcctggccttaagaagagactcagcaactgcaaatcatgttgctgagtaaaaatgtttcttgggatgggaggggatgagaggggaacctactcttgatagctgcctcctaggagcctgttcagtttattaaattagcaggtttctctcttgtggtgagggcactggagaatgaaatgccaaatagatcagtttcatggaattggagactgataaattttcagagctggaaggctccttggagagcatctggttcaaccccccctcgtttttcagatgaagaacctgcagcccagagataggaaatgacttccctaaagtcacggttgctacttgaaactcaaaactaagaggcattgagtgagggaagtgaattctctccataatttatcacttctgcatgtttagtgttctttatattaaatttacttttgataaggagtacctgcaatctcagaggtaatttactgtgaaagataattcttaagatttgccatcattattaacattgacttgaattatgttgtattttatatcagaacgtaggtttaatttagcccatggaaaacaattctctcagttataaaaaaaaacttacttccacaaagagaaggagcttagcttctcaccaagataatactaacgtaagttgcaattccttgcctacatctgccttttcaatcagatgttcacacctgtccttaaaatcttcgttagcgtccattgttaggttgggcaccttgggacagataatcagccctcactccagtgcagatgcaaagaggcgggagagttagctaggctgaacctgagttaatgaacatcaagtgccaggtgctgggctagaccctgaggatgcaaaagtcagaaccattaggaacaattcttctggagctcaccacctcatgaggactgggctagcttagtgagaatcagaaaaggcagatgaagaagcgttatgttccaagataagcatgtcctccttctagcatttgtatagatctaggcttagtccagggtgaggccatgttccatgaccccagcatggagctccatttctctctctaaaggtgcactgttcaatatggtagccactagccacaagtcgttatttaaatttactttcattaatttaaaaaagtaaaaattccattccttagttatgttagctaatttcaggggctcaatggccacctgtggctagtggctaccttactggacagtgcagggttaatccttgctgccacttagacaattctattggacagctctctatttgctgaccccagaatttggtctgtcatgcattataacaccaactggctcccatgttgactgtattttctccaagtgagactggggtaaacacccatcctgcatgggtcatttgcatttcctcaaaagcctttgcatgtcttctattgcagctgcattctacccaataatagtggaaaccaacattcatcacgtgtttgccttatgccaccatgattctaagtgctttcaacacaatcctccttttgatcctcaagaaaccctgtgcacacaaagaggaggtggcagaggcccagtgaaggacttgtccaccttcaccagccatggatagggacccaggagttggatctgggcatgctgcttcagagtccaggtctgaaccaccgtccattctatgtagagttgggcctagtcctggccctaccctttgctggatgttgcctttaggaaagacacaaacacttcaattctcactaagccctcttctccaatgggagaagctgctttcactctctgcaggggctttgtgaggctcagggacagggagagtgctttttgaattttaaagccctgagtgttaggggccattatgaaaaacaaaaatactgcaaatactgtccttcagatcagcactctgcaggctggagaatcacctggagagcttggtaagcagcagacactctgatccaccccaagcagactgtgtgagtccagagccaggcatcttcaggtatagcaagtgcctcgggtggtctgagacaggaatccttgagcccttctttgaagaatgctgattataagtttccggctttggtgcctgatgtagaggagtgggtggctggttctctcttcagattcctccaggatctcaattttcaaaggcaggtgcccactccaccctgtgcacatctgaacagggaattagtcccagtggggaacatgatatatcacccggcattccagaagtggaggctaccctgtgttccttaccacccaagtcttagtgtgaactcacttgaaagaaacagaagactatctgaagaacacatagtccttccaattttgtgagagattctccatctctttcaggccagatcattcaaaagaagcaagcttagatagcatggtctgtctgcttgtagaaaggcttttactaaattatacttgggcatgaggtcatcggcctactataagaaaagatgctataatgaacctgtcttctgaatatactgaagggatgctgtggaggatactacatcataacattttctccttggcaggatcaacactcaggtttcaggcccagaaaaaaactaacttttctttgagcagtcactttaggttaatcccatagacactgaggtttgagagttaacacatttcatttttccctcttgttttggctgttaggaagcccagagccaaatttactacccacctctaacaagatgttaaggcatatgatgtgcaaacactaatcctactgctggcttcgtgtttttaaagtttatttatttattttagtgagctatgaagacaactaaacatttaaaggggaggggtgagagtagggggcttgcagtacacatcccacagcaaacaaattacaacttctttcttaggcacttctctacacccacatccctccctggagctatttgggtggtggtttcatttttctgctctattttttctttacttggcatctttgtctaccattttcccttctgacattgtgtgcaattttgtaatctgctttgtttattttaatgagccatgcagtttatgaatctttgcctagaatagttattaattgtccagtaggtgtctggaattgttctaggtgccaggactacaacagtgaataaactcggcaaggttcttgttgtaacagagttatgtttgtactcatttgagaaatagacaatgaacaagaaagagaataaataaataatgtaatttcacagaatggtgagatctgtaaaggaaacagaaaatatgatagcaagggatggggaaggagaaatattaggtaaggcgggaagaaaggcctctctgggagagggagtttgaactgagatctgagtgagaaggagacagacacttagaggtctggggaataaggatcccagacagagtagatagcaagtgcaaaggccctgatgcagagacagcatgctgtgttggaagaatatttacgcccacctggcaacctcctcatcagctttcaaacccttctcacctctatctactttctccttgaaataatcccatcactctacattactcaaatagaagggcaaccacttcgtgccttccatatctgtataatccacactgaattgtacctggcaactgaccagcatgccttcctcactggactgtaggcacatggggcatccttgagaataagaatagcattttccttctctccaacacagttcctggcacacagaaatcacatagttttatttctcaaaataagccatagctaaagttacaatgcaggcagtgctcacactggagtactacctacatgttttgggctaaggtacagtttttccatttgcagagccccgagctgcctgtgctccgctggtgacctgaatagattagcagcagcgaaccaagggagcatagccagctcccgtttgggaggagggagctggctccctccttgctccaaagagccccttttgggaaaggaatgactcttaaggcagtattggatttccctgcaagatttatgacccaatttaaagttatggggcttttattaattataataaacaccaatttcattacacttcaacttccaaagaaattacatactatggaagggaaataaaatgttagttttgtgctaatgccaggcacacattaactggctgggtacccaggagaccaagttcctgttggctgctcagctggtgcagaggaaggggcattttggaagggagagcctgagggagctgtttccaggatttaaatccatttggtcaaaaacaaagtaaattaactgtgctgccacatggtgcttgcaggaccacttcctttatgaggagctgtaatgagtaacacactttgggccctgagcctggagttctagacctgtctctggcttgctgtgtgatctcagatgagttacttcccctctctgtgtcttgattttctcatcttaaaaataaagacttaacgtaggtcaggtatggcaaatagatttaatatcttatgcaaattccaatttataggaggtagtcacctacaaggctattttgagaaggtttctgaagtttcgtccaggattcctgggaaagagcaatatgatcaattagcagtatcagctggggacacaaattaggaggatggaggtcatggtctgggtattcactatcccaggacttgatggtctcaaaggtccattctggatttgtggtttaatttaaggctgtgttcttgggatcctggaaacttagtccataatccttatttataaaatagatgtagtggatcataagtcacatggtgttgtacagattcaatgatgctacatatggcatgtgctttgcaacagaagacactcaacaaatattcctattcttcagcatttccatcctaccctcataaaaccatgctaattggtgaccctctccatttgttgagggttttggagaacttcctcttccaaagcctcacctcagtcaaagtcagatacatgggctttttcagctacttgccccttgagcatcatctgaagccccacagattccaaaagaagaattttgtttttaaagctgattggctctatattttattgttatggacttcccaactctgtgctacttttatttttgctggggaatggaaaatattttgtcacttctaggatgatagggcttgatgaacccccttagggggtggagaagaggattcagcaactttgcacaattgcttcctgccagatgtgaaattaagcttctgggtgcaaacccagagtacatttggataatggatgggaaagcctgctgggcttatggggaggaagaagagaagaggggaaggacagaatgagagaagctctgcgtgcgtgcgtgcgtgcgtgcgtgtgtgtgtgtgtgtgtgtgtgtgtgtgtgtgttcatgtgctctctgggcctcatgatgttccagtattacatatttccaagcagagaacagatatcagcagagcgagttgttctctcctgggtgccctcacctcttccctgatgccaccactatgagagtcatatcgttgtccctgagtggttgagagcccacattttgccgttattcagacctgggtttgaatttcagcctcaatactcacactagctatgtgcacttgagcaatctttgatgggcctcagtatcctcacctgcaaaatgagattaataaatagtggggtggataatccattggtgttttgcaagtgaacgtgtgagagaagtgctatgttcaagacaccttattgatgtgttttcagcttagccttaagttactgcatgaaagagacaggacattgactcttgctgtgccttggtctccccagcagtctacaaaggaatgagacaggatgaaatcccaggcccttctagttttgaccattggcataaatgataaacattgtctgcactcctggagtacagggaggatgcaccccatgcatcctgaatgcatgaactactctgatgaatactttctgctgcccaccctgcaattagagcccatattgggaaatttcagactttgacgttgcgctgctgggttgtacattcaagttctgcctttacttaaatatgtggctatgaacaagtcacctatgctgtccagtcctcctttggatccagtctttttgaataaatgggggttagtggcaagcattgaagttttttttgctatttttttttttttttagatggagtctaactctgttgcccaggctggggtgcagaggcacaatcttggcttactgcaacctctgcctcctgggttcaagcaatcctcgtgtctcagcctcctgagtagctgggattacagacatgcaccaccacacccagctaatttttgtgtttttagtagagacggggtttcaccatattggtcaggttggtctcgaactcctgacctcaaatgatctgcccacctcagcctcccaaggccaccacacccggcctgaatattttcttccatgtcatgtgtttagcaccttgcctggctggttataaatagtgaagcagcatggcctgccattctgggcttgtagtgcccggactgagacctccatgcatgctagactgtccttctcttaagaaacaataaagccaattttgcctcttaaggggttgcctagtttacttggagccaacagacaaatagctttttaaaatccttcataattcaagcgtggttgatacctggatgtcttcccaggctgagttgatcctggtagggaatcttctctgattatcctctaccatgctgtgatttggtatctgtcccacaagtcctgaaacattgagattctctttaaatcatgtcttacgaggcagaacagttgtaaggcaagaacatggactctaggtcccataaaaccagaattcaaatcctgaattcaccacttacggggtgcataactttgcagcaaatacacttaacttatttgagtctcagttccttcatctgtaaaatggagacaacagcagctgccctgtcagggtaattatgacgattaaatgagattaaaaaaaaatgtaaagcactttttcagtaggcactcagtagaaacaatgttttccaatgtgaattgttactctgtttatattgttatccaatcaacctttaattacctctaggcaaagatatgttaataatttatttatatttcttttctttttgcctcagagcctggtagaggacaaatgaatgcatgagcaagagctctgcttagcctgacttcaggccaaggatgtgtcttttcttcttggttagaatgttccttccccaaggatggcatcttgcaagacagtgcagaaatgcaataacttctagaatattcctttctcatcgccggctttatgtttcccactggttcaacctgctccatcagatgtttttttggggggaatcttcccttcctggcagcccaagtaagttctgattttgcatatgcagagagtctagcgactccgcaacagccagggtatgaatattcattgtcagtcctcagctgtgcaatggacaaagaaatgctgatggaggaggatgggcagggtctgttcgcttggcctgcaggggctcagagctcctcaaggatgcattagcccaatggcctggctcctatcgggggctgtctgtagctttgtaagttctggcagtcaccccttgacttcaacagtgactccaacctcaccatgacagagtcttggccctttgggcatctcactaatctgaatcctctcagaacctgtgtgtagcatttatgataggcgaaacagtttaccccatagattacaattcacactgtctcctgtgtcccagggtcccatgtccccagcttagaaggcaaaatttacattgtattttgtgtgtatggttccccccagggttgcacaacatggtggccctggccccatccattgctcatcactctgctttctacaaaagccagacatcctggccgaaaaatgaaccagacaggataaaggagaagctagttggtcctattgatttacagtcttgagatgggtgggggcttcaagattataaagttttactaaagctccccaaaagatgtccatgggtaggcacattgggaaataggggttataccatgataaagggatattatcaccaaatgggctatatgtgtgtgtggtcagtaggaagactttgaaaaggagggattttggagaaatatgagcttctattccaagtattgtgtgtcaaaatgagactcactcagagaccacttccttcttccaacttcaatgatattctgcacagcatctatcaaatgtcctcttgttgctcctaaagaaataatggttttgccccaaagcctctctctccttccctctgcatttcacattaaactttgtattatggcatcccaccccattgcactttgcactgttcaaggacaaagaccatctcttaatcatctttgtgcacccataacatagcacagcatctgctatatggtggtatacaacaaatggtttagaatgaaatgaaatatatctttatccagatttctgtaattggttcatattgactttagctagaaatcaagtttgaagcaacttacaatatgcaaaagccatggcggcacagtggtaaaactgcacttgcagcaaatgtacccatgtgcttcatttcaaaatagttaatatccctggaaggctacatactattcccaacaatattacctttgctcggatgtatctgaaattctagtttcctagctgttgtcttcatagctgcagggatcaggtggagcctatgggagaggggagcccaccagtggctggaaactctgggaaaggggcctgttgtgtgaatgattattgcaactgtgaaaacaagtctaagagtgaggataaaaagttggaagtggatttacaccagagatgccatggcagaaatcgaagatggatgatgaatataggttattgggacagttatggtaatgggaactagttatcctcaaactgaaggagtcagtgccagcaatatgtcctgggtgaatgagatgaaaatatatttcccttgcaactataaaagttgcaattggacatgcaacaggattccaagcaagacaatatttaatctcattttatccccaggggaggtgctctgcccatatttctttctttcttatttttactttttatttggaataattttagacttacagagaaactacaaaaactgcccagagttcatgtataatctttttttttttttttttttttttttttttttttgagactgagtctcgctctgtcacccaggctggagtgcagtggcgggatcttggctcactgcaacctccgcctcccagattcaagctattctcctgcctcaacttcctgggtagctgggactacaggcggatgccactgcacccagctaatttttctgtatttttagtagagacggggtttcaccatgttagccaggatggtcttgatctcctgatcttgtgatctgcctgcctcagcctcccaaagtgctgggattacaggcatgagccaccacccctgacctcatgtatactcttacctagcttcccgtagtacaataatcaaaaccgggaaattaacagtggtataacattattaactaaactattgatctcattagaattttatttatttttccactagtgtccttttcctgcttcaaaatccaatccaagatgccacgtggcattttgtcagcatatctttttattgtcttccaatatgtgaccactttgcattctttcgttgtctttcatgatcttggcaattttgatgagtattggtcaattattttatagactgtctcttgattttgccccaattctaaatgaagaaaatacataggcttggcaggttacagggtgcacaagaatattaactttccatttttccatacttacttccaaagtaagtcacatgttactctgattaactcaacttaccccttcctccaatggctgttgcccgcttgccaaattcatattaattcctccgaggtaaagatcctcaagtttgaagaaacaaaaatctgagttaaagctctaaagagagcttgcagtgagctgagatcgcgccactgcactccagcctgggcgacagagcgagactccatctcaggaaaaaaaaaaaaaagctctaaaggaactccccaagagaagttgtaaaaaagttttcagcagaggcagctccatttaaggaagtatttcacctctccacaccctagcttagccacatgacagggcgatgctgctgccagggccagctgtcagcaccgagatgggggtagtgaagctgaaccgtggggtggacccctggagtaagcctcaggaggatgtgagtaccatgctaacttagtttcttccaatctgtggccacttctctctatttcttgtctttcacgatcttgacaattttgatgagtattggtcaattggggcaataccgccagagggtggccagggtctgaaacaggcaaagcagaagagaggcactatacctgagcaacggatgaatgagggtcaaagcctacaggaggaagccagaggaggtagacaggacaaggctggagagagagattggacgtgtgattatgtggactacctctgataaagaggtctaagtcccttctctataagagggccttggagacccggtatgagatacacaaagggaccattttacttaaatttcaaatactgaaacttgtgttcaaaatttaatcatagcaatattccataacatgctagatagatgtcttcatgttttgtagataaggttgtatcttccttcttccttaccaccagcacttaacttatttcatataagagtgcaggttataagatttaaagttccagaatagtctacatgaatagagatctgtggagctgtgaagtgcacaacctctgcaattgtacaaagcagccctgataggtgattgaatgagtaaatggtacaatatcttatgggaagtgagtatcctgtgcttacttctgggaccctaattacttccttgtaacatgagcaatgctatccctttctccatggtgatcacacatttcaaaaagttaacctaagtgacacatggtaaccgcacatagtagacactaagcaaaattagttccttccttttcctcatcaattccgtcacatattaataagtatcatatgcattctttaagcatgggagaggcatgtagctgatgtgtgttcaccagccagtttaatctggagagaagggcagagttcaccatcttcatcccctagatggagtctcctgggatataccagtgagggaaagttattagtggttttgccttcttgttctggatattattccatagggtctctgctgagacacccaggccccagtggagcacgtaattgtaagactctagatctagcaaacaccccatctgcatgccctcccaacactgagaatctgtacatactcattaaaataaatgccctactgtggattatttattactgccagggtgggagtaaaaatctaattactagttgtattattttgactcatgagaagtaaaaaaaaattttttaatctctattagattattcatcagcctagtgataagtacttaacctcacaactcaatgcttagtctattttaatacaattttcttaccaaagtgcaataaagactcactaatagacagttttatacatactcattgaggtgtaaacagaccataagatgttgaagaagttggaggtgggagggtatctagggaagagggtgggggctgcccattcaactgtcatatgagctgtgctgtgagccacagtggacttccatgcaggaggatgcaaatttccacctgcaaacaggatgcatgatgaatatgcctttaaccagccttggctaaagacagcagggtgtattaaaaagcaagttggagagatggggagacaggttcacagcttccaggctcctggtccttggctatggctcttttgatttaggtgcttcttttgtgcattaggctcaaacaaactcagaacaaatctagccacgtgtaatatcctttgcaggtgtcctactatgacaaagtcctcccttttgtgcttctgacctgtctgcccttttcctcctctccttggctctcagattccttgcattctatcctgtgcatgtctttgggcgtctctttctcaccattcactcctgcctctggctcatccatgcctcttgcatattatcactccctcctaacttctgggattgtagtagcagcagtggccacagcaggttctggaagagaaatactcccttcagcagccttatcatcagtggccagtttttccagtttatcctgggtcctacagagatagagcatctagactgtcacctggttcttccccaaagtctaaggtgagcggggctcaggttaggtgaattctcccatatgggactgattttcttcttccattcctcccttattcctcccttattcctctttttcattctggagcacctaccatatgcctggaagccagctcagtactagggggtaaaaagatcgataagacacagttcctgcaaagccacatttcagctgggaaagcaggttttaaaatgaagagttagcaaaccatatgataagctttatgaaatgaggggtctgaacaagttcatccccagaatctccttaagttccagaattctaaaggtgtagaattctgatggcatagaaaatcttgtgatcttggtaaatagaggtgtagtgatattgatctggtttccaggactttccaaaattgtcttggaagctttgttctgatcagtgccactgcaattccaatcagtagtataatgtttgccttatggttctatgtttcatcaatcatttaatgacaatgatattgcgactatgctcgatcactccattgacaggtatggtagattttctcacttggcaaccattcagatttcctttttattacgtcttctaacacagcagacactagaaaagctagaaatgacatgtcccagactctcttgtacctagacatctggctgtgagcaaggttctctctatcaatgcgcttgtatgagacctaaattagaatctgagttctcaggggaaaaggcaggagaggtgagatcctgggagaggtaaggaggatctcctgcagcaggagatgtgactcaggattgagaattgttactgaaagcttatcttattccttcagccctaccaattattttgtaagctacctaaaacctagtaataaatccctttcccttgaactacccagagttgtttctattaagtgcaactaagccttaaccaacagagcacctagaaggaaaataaattcagcataacagcacaaaatcccagtttacactaaaatagagtacatttaaaagtacacatcttcccatttagctaatgcaagaggctcttaattttgaggtcacctctgttttaaagtagatatcaaaattcccaagaagtatgtccacttcagcactgtggtggacagcgatgacacatctttgtccttgtggctctgcagccagccggtatggctgggcccagacatgagcattccatgccggccgggctggggcaggttccaggattgcccagcctcagtctagggagttaacggggactccaacagtcaatgcaagacagtcaacatctgggttttctatctatgggtatcagatttccaaccactgatccagagtccactaggaacccatgattttttagggtggaacccctaattctcgaagacccaattcttcaagaagagtaagattagaaattcagccagaactgttaaggtcctgccatttccccaaaaccatcaatttctaggaaatcaatgtcaaacccatctgaagaaacaaacatcacagcaagcattctgtcactttctgcatggaatgtttgtccctgcttgcattcccccttagtccaggaatcttttctatttcaaaaataataaatgtgaagagaggaaatcctcaacaaagcagtatccattccattggcctgtctcccgagacctttgactttgcaagaatattttagtttcaacctttctcctcagcaccataaacactgcagtgacaatttattcctttccagcagccataaaaatcatctcccttatttctcaaaaccatggcaaattagcacctttgaccttctttttctcaggccctgtctttctctctcatggtgcagacacatgaacaatttatgatgttccatggagggttctcctttcttgaatgctgatagaaaattccagccagcaatctccatactaatctgtccctctgcttatctcaagcctgtagaaataaatccaaagtaacattttccaaaatgtgttttatagctcaccaggcctatgaaatgttattaggtgtcccacaaataaagtattttgtagtcaagtaagtttggaaaacactgcatgctttctttagagttcagaatacatatttgcatattaaaggctctgacaaatcctaaagaaatgtattcaaatttcaaatttatttagcccagaatctcccagtttatttaaacatggagggttttttgtttgcttcctagctattaaaattctgtgcaacagtgttctgtgggtgcaagtttgagtagatgatgacatttgaaaatagaaagttgaattaaacaaccaggggtttggacatgagatgagattccaatttctataacaactgctgctgatgggtgagactcatagccaaggggcttaatacagagtcaggctgagtagcttcctcttgcccaaggttatttctgaaaaggagtataggactaaatcagcagatggggcttaaagaattatagctgggccaggcacggtggctcatgcctgtaatccgagcactttgggaggccaaggcttgtggatcacctgaggttgggagtttgagaccagcctgaccaacatggagaaaccccgtctctactaaaaatacaaaattagctgggtgtggtggtgcatggctgtaattccagctactcgggaggctgaggcaggagaattgcttgaaccctggaggcggaggttgcagtgaaccgagatcgcgccattgtactccagcctgggcaacaagagtgaaactccgtctcaaaaaaaaaaaaaaaaaaaaaaaagaattatagctatgatgatgagaaaagatggagagccttgctactcaagtgtgatcccaggcaagcagcatcagcatcttttgggagcttattaggaatgcagagtctgaggcctcatcccagacccatggaatcaggagctacaatgtaacaagatccctacatggtttgtgtacacattaacatttgagtagcaccggtgttaagctgtggttctccatactgcctataacttagaattacctggggaactttaaaaatataggtatctgagatctgtccccagggattgcaattcaaatgttctgaggcagagctatagagtttgtacttttaaaaactccctgtcatgcaactaaggtcgagaaccactggtctaacccagacgaatgccatggataatgaggatttaggagtctcaggagacatgataagaaccaccactttgagcctttccacagataagtgctgcctttggaacctggttcactatgataagttagaaccacctgaagagcatccatggccttttagaaggacccctcatagatgttatcagatgcaaaagctacaccacccttttaggctcagttacttctgtaacttcttccttaaagttgatttaggagttgtaccattctatcttctccgggtctcagtatgttgtcagaaccacactcttcttgcgagcaggcttgtatgccaaccagaaggctaacagccttaattacagaatgtcctttccctaggagttggtcaaagtcatcttgacatcctcagttgggtggagaatcttgggttatgtagaaaatctcagagaggggaatcgcctcaaatgtgcacaggcttggtattccatcattggtcacaaatgtttcttatggaataaaaatacctaaatgtattaagtagttcctgcagtagacaatttgcttgagctacctagtttaaggcttttttttttttttttttttttttccacttagcgttcttgccttaggaaagtaaaccaagcctcctggaaagtaattattttcctgactattaagtggcagaactggaattagaattcataccagcatggctctaaagctcctgcttttctgactgcactactgaccagagcattgagacacacagaccggctctagttcagacccaggacagacatgactgatcccacatctcactggaaattatgatttcagacaactggaaaattctcattcatcagaggatagagctacccatcaagccatgtaatgtcttcccttgcatcatagcttgtcctctgctgctggcttcagaggcatgtgctgacatagataaggagtgctcagtgcctgtgctctaaaagagtgatgtgcgaggacagataatatgcaaagtagggatgctagggagagtaaaatgctaatatggggtttgaacctgtagatagagaattcagtcaaccacctattatctgcagttgtaaacaggagagaggtagttgtcactggtatgtcctgaagccgttcctcaccctgctggggcagggaaatgtgatagtctgacatcagacaaatgagagaatgaccagggacaggtctgtgagggtggtcgcaggcaggctgaagttctttttttgtttgtttttttgcatcaggttcttggttcttgctctgttgcccaggctggagtgcggtggcataatctcgcctcactgcaacctctgcttcctgggctcaagtgatcctcctacctcagccttctgagtagttgggactataggcacaagccactatgcctggctgcccagctaatattttaattttaattaaattttttttttttttttttgtagagacaagttctcattacattgtccaggctggttttgaactcctgggcctccaaaagtgctgggattacaagcgtgagccatcgcacctggccttgatgttcttaaaagaggctgttgcttgacaggcatctgctcccttattacgtgtctggttggcttttgtaaccaggagacctatggtcttctccgggtctcagtatgttgtcagaatgacacccttcttgcaagcaggcttgtatgccaaccagaaggctaacagccttaattacagaatgtccttcccctaggagtaggtcaaagtcatcttgacatcctcagctgggtggaaaatcttgggttatgtagaaaatctcctaaaaagttcccccagcaaaccttgggcctatcttcaatgctgagtaagtattccactcctaacattttgggcagctgagagaagatgcatgatggaaatgcaccagttctgaggctcaacatgtgtccttcacttatgagaaaccaggtggtacattaagaggttcaaggtggaatcacaagagccctcccttcactgcttattgtacaaacacctgcgagtatattcatgctgttaacaaaacgatacatcaccaatctctcttgagactactggtttcattcaccctctcctataaggctgttggaatgcaagtatcttataggactctctacatttctctaggtctttgcatcattttggtgaaaaaggatctgacatcagttctgtggctttggcatcaagacctactgggatcttaacgaggaggctgagctgttggcactgagcaaagtcatggatagactgacttctctggctacaagtcttgaattctaattactctggtccatgggacatgcctaagctgggacatcactggctttactgatgctcatggctgtttgatttcttgggcagggtctcctttcaatcagctgaaagatgctcttttgggttttaggttctatctaggatgtaatcagctcttaacaagggttgggtatagagagctcaggtaaatccttgggagagggggctggctaagtagaagcagggagtcaggatctcaacccaataggccaggcatcagggcagtgggaatggaagagaaaccaagaacccttgaagcggaggtcctgttttatgcccttgtcccataaagacaggtgaggtgaggactactgctcagtatgcactgggatcctgggggtcaggcgataagacaactccagcatccttcccctgatgggagtgggatgtcttaagctctggttttcttcaacacagacatcctgaaagattggaccctgcagctaagaagcattggagaaggcaaatgctggcagtctcaccttgcaattgccatcaatggtgctccatttccatgcacctcccatttgactatctctgcttgcttctcaatggtctctgaaaatgatctctctttgtcatctagttttgcttcccatgtgacccattactcattctccctttggtctcacttgtccctcctctctaccatgagcccaccaggctcatctcagctctgctcttagttgtaattcctattgtttgtttttctggaattcttttctttcttccggatgcctccccaagttgtacatcttgaaggcaacgtggagatctgtcttttccttaaatcctctgccaactcctgccgttgactgaccacttcattgtaaccctgaatgcttgtagcgctttcacaatatgctctaaaattgagagtttaattctgtactgtctttaattgtaggctcttatttaatgtcatccttctcattctgctcaattcaacaagcatttatgaatattgataatgggccacagtgggacagcacattaagttggagacagttcttgcaaacataaaaatagcacctactcagtgcagggcagtttttttccctcacactgaatttcaagcttctttcacagtacataacactagcattcactgagcacttggttctcacagactgtacggagaaatttcccattatcttatttcctccttacagtgtcccagtgtgcacagcagctttccatcattctctgccctggaaccccctttgagaaattctgtgcccgctgtattcttagagacacggaccccatggtcacgttgagtgggcagtaggccacatggtatggtccattagttgtggccccctactctgatgctgaccaaagctggaacaaccagtttctttttcttcagtatttgtaatttggactaaaaaattccaatgtctgttggatgacaatattgagccaggggtcaaggacaccatattggactatctattttctgctgtgtacatagagaagcagacaggggagggagatgatgaatcagcaaacatggagaaaagcagagggaaacggagaaggagagacagatggtgagaaagataaaaagatggggagatcaagaaagcataactaactccattgataacagcgtctcagttcctgattccagcccttgtgagagctggcagtacttcctgcccttgaaacacatatcactacatctttccaacagtttctggcttaatgaagtcagcttacctgagttactattaccacccaccacatacacctggttatgacacactgtgagaaacattacctttccatttcacagattaaataactgatccttggtgagttccactatcttttagtcaaagattggaactagaaattgaaagcagacctttggattctaatatactgccctatgcttaaaacctaacccagagctaaacctctagtaggtcttcaattaatacttattaatccctggtgaactggtccaggtcattctagccttaatcccctattccttcctttcttctccctactgcttacctgatgtcccctgactgttttcttagtcatttccttggctcaggatcagccttcagccaagaaaagagcacagccatcagctgttgaatggtggccctgaagattatgtcaccattttgacactgccatttggggctgcctgtggtcttgtatcatcaactatcttccatgataattgggaggggcagttgaaggcagaggcatctccatacctcagaaaaccttaatcaagagaacagcagtggtgcctgcgctcttggcagtttattacaattcctgtaacaagaggagctgtggggatgtaaggcattatcctctcccgttgtttctaacaaaatagcccagaacagcaggcctacaaggacaaggtgaggccattctccattccaaacaacatatacttttttgaaaataaaagaagcaatttaagcattttggcttcctggggtgagttggcaggcacacttctcatctcagggatgccttcgggtgaaggtgttttaataagagagaaagcgggaagaagatagcagaactctccagaggcagagtggaaccacggagcatgggctatggagcccataggctggggggaggcaagagaggggagacaggagagggcttgagggggatgcacgtggtgggagatgccttgttctgcctaggtacatgtgccctggagtccgaagctcctgggagagccccattaaccacaactcagaggtgaagaatttaattctatttattttgcttcttcatttatccacagcaaataagagaatgttgaaatgatcattatataatttgggggtgagaagatatttcctcaattacatcttttgagagcctataccctaataaggacatgaaccaaaagaggctgcgtttctttgaaatgatggatatgtttctctcatcccctgaagagaaaatgtgaggtagtggctctggggcctggctgcttgggattgaacaccagttcctctgtttgctaatggtgtgaccctgagcaagttattcaatttctgcagacctcagtctcttcaccactaaaataggagtaataatagcaccaccctcgttgaattgttatgagtgttaaatgagtgaatacccgtgcagtgctaagagtggtgcttggcatgtagcaagagcccaggaaatgttggctattaatattcaaacagcttttggggatatcgctacatattctgtgcctaagatgcaaagatgaataaggggatatctgtcctcagagcatccatattccggttggatgacagacattagaaaataacaatatatcaaatttattgagcactcactgtgtggcagacagtgtgtctggagcttaatgagagagatgctattacttatctcaggctcagagaggttaaacaactggcctaatgtcacacagctaagcagcagcatagccagggagcaaacccaagcctgcctgataccaccatctgatgtctcaattgctgatttttagcatggatactacttcctcagagaggatttgcattattcttccatcgagatgatggaaacatctcatccccaggttggctcttcttcctcatcccattctgttttccttcatagaatttgtcacaattttaattgcatttttatgggtcatcttttcccccagactataaacttcatgagggcagggggcagatctggtgcattcatcactgcctgtctagtgactagcacatggcctgacacagagcaggcactcaataaacactactggaatgaccacctatcatggactgcctctctggagggaagtaggaagttacagtgtcctctgaaatgctaaaataacatgaaggaaacacatggggttacctcagggtgttggggaaggcagttctgaggaggtgatgtttgaagtagatctagaaggatgggggagcttgtccagtggagagggagtggaggctatttcaaccgtgtgcagaaacatgtccccaggaaaagccaaagggagttgagaaaacagaggaagcccagcctagcgaagggcaagtgtcagaaatgtcttggcttcctcggttacagctccagtaaaaccacagaggcccccatttaggctgggcccagagcgagcgcctattgggaataaggttattcccacatggggctgagtcttcacactgcaaaaagccctttgaagatccctttgagggagactgaaagaatgatgttttttctttatcatccacagagaaagaagataacagtttgactagggacctctgtgtaatctacaaatgagcgtatcagttagaattcagttggttgaaagaagtagaaaaccccacactcatgggagttgaaacaggatggacacctggctccatcatgtccaagctcaggatgggcagtcctgggccatggtagctcagtcccatcaagtctttggggaccaggcagcttccagctttctgctgccccatgctgaggtattctcatcgtccagaatgaactctgactgttaccccagtgttccaagaatcagactgaagtaggcaggggaagaaacagcttttggagccctctgcttatacttcattggccagacctaggtatacgaccatacctgtctacaaaaagaggctgaggaatgtgatcttcatataggagactgtgtacccagctaacacccatagaccttaaaagaacttggaacatatattgggatagaccacagcagacccaggagtttgcaaatttctgtttgcccttggtgtgtgcaatgaaatcattacctggaccagagcttaatgtattctcaagctagctaacattcatacttatggattgaatactacgccatgtcaatcatttcgcattttaaaagcagtggatcggctgggcacggtggttcacaggccgggtgtggtagctcacacctgtaatcccagcagtttgggaggccgaggtgggcagatcacctgaggtcgggagttcgagaccagcctgaccaatgtgaagaaaccccgtgtctactaaaaatacaaaattagtggggcgtggtggtgtatgcctgtaatctcagctacttgggaggctgaagcaggagaactgcttgaacccaggaggcagaggttgcagtgagctgaaatcacgccattgcactccagcctgggtaacagagtgagactccgtcaaaaaaaaaaaaaaaaaaaaaaaagctgtgaatcactatgtcctaataaactaataaactttataggtgattctggcaggatgtggtggctcacgcctgtaatcccggcgcattgtaggctgaggcatgtggatcacctgaggtcaggagttcgagaccagcctggccaacatccaaaaacccgtctctgttaaaaaatacaaaagttagctgggcatggtggcgcacacctgtagtcccagctacaggcaggagaactgcttgaacccaggaggcagagattgcagtgagctgagatggcgccactgcactccagcctgggtgacagaggaccctccatctcaaaacaaacaaacaaacaaacaaaaataaaaaaataaaaatagtaaatctttataggcaattctgagcaccccctaccatcttttccccttgacagcagttcttccccagcatccctggggagtcctgtgtgaaacctctgacttaagggaattgtcaagtatttctgcccagaaaaactagagactgtcaatagcattttaaaaattatagactagggccgggtgaggtgtctcacgcctgtaatcccagcactttgggaggcggaggtgggcggatcacctgaggttgggagttcgagaccagcctgaccaacatggagaaaccccgtctctactaaaaatgcaaaattagcggggcgtggtggtgcatgcctataatcccagctacactggaggctgaggcaggagaatcgcttgaacccaggaggcagaggttgcagtgagccaagatttgccattgcactccagcctgggcaacaagagcgaaactctgtctcaaaaaatgataataataataaattaaataaataaataaataaaaattaaattctaattgctctacctttttgagcagcacttccagcttatcatttttgtaataaatccccctcccccccgccaatttctgccagttctcacagatctctgagcttctttatttgggcttacaaggagccgggactatttggtaccttaagggtttagaggaatgaaatgacataaagtgtgtaaagagcttagcacagcacttgatgtgtaatacattttcaataaatgttagctattattattttctcagaatttgttctgcttaggtaaaatgcaactgtaaacattttttttttaagcaaaatggcctaatagtgaaattgttgtgtctatcccatggcaatccctaagttacgactaataaaatacaatttattttttagttaaattcttcaccaagggacttttcttgattcttatctcctgttattctgtttattatggcatcaaaagttgcaaagacctcccctttagcccatgccaattcttctgaatcattttctatgataaactgaattccaggacttcactaccattagcttgatctactgaattatatctctaaaatgaatctgaaacatcagctccttcttccttaattattcgatataattcacaaataaggtacctggagattcctcttcatatttatcataaagagtacacttagtcttattctgcatatataagatattcttgctgccaataatataaataaaatgataagtgtatgtcagatacccaataaatggtaaccatcactgtcatgttgtaattgttgacgatacttttcgtatttattgagcacctacaatgtgccactcgactaagtgtttaatacacacaatctcattttaattttcccaacagtgctgtgagatagatgccattaattctattttataaatcaggaaactaaaactcggagactatgtctgggttgtccagaaaatagagctcagagccaagcttacttactaaactttatcgcagggcgagaccataatcccagggaatcataaataagggaaagggggcgtagagtagagtaggaagagaagcagtttcaaggtgatgcacaactgagctggccacaacattgcaagaaaacacaactggttgctccatctcacaagatgatgctggagaggccatataggacatctacattgcaaacggtccattgtgggctgggcaggtgagaatttactggctggtttcttccaggctcctgtctttcattacgaaagttggccctgtagggtggtgactctgcagttctcatttatgttatccagcctctcagggcagccagtggggaagccagagcctctgtgagtcagttggggtggacctggatgctgatggtctgtggttcccttcaattcgtgtgcaatagaggccctgacaaaacccagttcagtctcaggggagcctcgatgaatctgcagagtttgggaatcaggagacagagatggtggccagagttttacaactgcaggaacaggctaaggggtaggtggtgtcttctgatggggaagccaaacaagcgaccaagaatgaaggccatatggggccacctggatgtggggtggcacataaagaagttgaggacacgcagtgttgtagggacctgctcaaggttacacagactgtatatagcagagttggcattcaaacccaggccagtctgactctaaaacacttttatttttcaatgacctcaagatgccttccattgctgagattttaagtaagctgggaaagggagccatggttttctgagctgtctggctcagggccatgagtagataaatgcttacgaagtagtcacagttgatcgatcaggtgacaagaatgcccataggcctgtgttgttcttttctatatcttaagaatagatactttcggaaggcatgatccatcatgtttagaactcttcatatggtctgctgtggctgtcttaactcaacctgaagggttagcaccaaacacagctggcgtacgcaggcaacatatgactggacagtgctctgccctcacctcggcctgccagatagatgtcaagggcatcagcaatgaaattaaatggctccatttccttgaagggttaggaggaacttggattattggtgacaagaccaataatccaagaagtgaggctcaatagctgtgcaaatctgagacctgggagcaagaagacaatacacctttacaggtgtgcctggctttaagaaagcccatcatttgccaggggcttctcagttcttttgtatttgtccttcccccatctcagaagcatgaatgggccccacctccctccagggctgttcctgctctctaccccagcctttcttggttctcttggaaagtgagtactccttcaattactgccctggcatctctctcaccttcaatgtcttcctacttgccttggggtcctcttctcagctttcagacatgttcagatttatcccatttaagatgacttttgcccatttctcctcaagctacagcccgtttttctgcttctcaattttctcaaatgagcatctattggctcttaatcacacactcgatacttaactgtttcaacactagtttccctctcaccagtctcccgaagtgctttctgcagaggccgctgcaataaacatctaatgtttctgccactcctcatagcatgcattttccctttttctacagcgaagaaactggaaaactgacttgagggtaaaggatgcaaaggggtttcattgacttctaggtttcactattgactagctgagtgaaagtcaagaggagaatcaagtttgggattgagggttgtggggaagatggcataggtgagattgaaggcacaccaggcctgaggccccgtggggacactcaagagcatgatgtccagcacactgtgaggaaagcaaagctgaaatccccagaggagggagactcaaaagaggataccacagggtgtttcttccttcttccagggagaagaagggagaatgcagactatgcctactttcctacctccttgactttgcttatgctacttcctttcccttttccatattccaattctcctcccagataaccagttcctttttcactcccaacatatgagatttggtttggctaggcatgcaactccagggtggataatatgatcttgacctgagccagttagtgatctgtgcagggatgggcacatgagactttttctgaggctgctgagacaaagaccatttctctttgctgttggatttaaacctgagagaagaaaggccttgggctactaagtaccggtaggtacttaataccacaaggagagagagctgggctgggcatgaagcccacccagagaggtggagctgagaactggagagaaccaaagtaggatcctggtgacatcatctgaatccctgaatcatgccacacctgatgacatccctatttgctagtcttttcaatttaactcagtcttttagctgaagccagctcactgggatttatgttatttccagaagaaagaattctagctgatgcagaaatctaatacaatcatcagtgacctctgaaataccaaaatcaagactctcttcttagtctcctttctgagtatgacccagtgcctaaacttggaaactgatctgggggtaaaggatgcaaagaggttgcaatgacttcaaggtttcaggattcaaggactgacagcaaagagatgccactagcagaggagtgaaagtcaagaggggaaggatcaaaacccaaaccacaggtttacaacccagttcccatacttgttacttttatgcccttacacattgctctaggcctcagtttcctcatctgtaaatggggctgctgtgggaagtgtatgtggcaggctttgaggaaatggcagtagttctttggatgctattggcagacactggtgagtggtggtgtgggtggtcctgaagacatcatctctctaccatattgaacaagcccactactgacccacacttgctcccttccatgtcccctcacctgattccccttgacttgggctgtttgcatcgctcctcctgcctttctaatcacatattctccagttcttcttcctccccacaaatgttggtattttccaaagttctggcctgcactctgctgtatcctattttgagtctccctcctctggagatttcaattttgctttccctacaatgtgccagacatcatgctcttcttgggtgtcccaacagggcctcaggcctcacgtgccttaaatctccccagcgccatcttccccagaaccctcaatcccaaacttgcttctcctcttgactttcactctgctagaggtttctcttttctcagtccctgaggcttgaaacctggaagtcattgcaaccccttcacattctttgcacccagatcagtttccaggtccatcatcttctattctctctctttatatttctcaacaccatacccattctcttccccttgctaccactcttgttcctgctttccttgcaataacctactgaatagttcctgaatggtcttccacactccggtttcttcttctttaatctattctcatgaatgagtctttttaatgaaaatcttataataaacctcatttccccagaaactttcatgattaccttgacttttgaataaaataaatataattcaacaaacattaattatagcacctcctctgtgtcagacactgtgttaggcattgtgaggaagacaaaattaaaatgaatattatatttctagggccttatgatccagtagtttagcttaccagaccataaagcccggtacacacacacacacacacacacacacgtgcatgtgcacacacacacacacacacacacaggtactgaataacgtgaactctcattcattccacacacacgtgcatgtgcacacacacacacacacacacacaggtactgaataacgtgaactctcattcattcccaatctgccttcccaatattatttttgctttcctgtgccttgtgcttaagtaaggatggacgacatccttttccatgatttcctacctccttgactttacttatgatgtttccttttccaggaaaatccttctctccaactctgcttggccaaatcttgtttatcctttgttgtctttttcaaatgaaaccctcccataaatcttttgctgattatcttgttaatgtaatctttttctcctctgatctcccaaagcaccttatatgaatctccacctggcactttccacttttaaaaaaagttagctttgtaacttgtctgcccaataaaattgtaaagtctcttattgttttatttatccttgcatccccaacaactaagacagtgattattgattacagctaagtatgcatttacctgtatgaagcaatgcatcactcagggctagctttttgtactaaaaaggattctttgcctgaaaagttaaaaaaatatttccagcagtttcttttaaacacattcttcaggttcattttaacttggttatgaattatcaaccaccaccctggaaaagatctgtgggttgggagaaattaaagaaataacaaaaaagtagaattataagaaactactgcccattaataattttctagaaaggaaaagagggtagaccttcactgatcatggaagctgttaaggaaacaggattctagtttttagaaatgagattaagacatagcatttactttacaaaacctgtattagaagtaagggcttgatctggagaagctggcatcacaggcatgtaaactctcaatgctactgtacatgagtcatgcatgcggaagaaactttggtcttcatggatttcccaaagggtctcaggacactggtgctgagttagcctaggagtcctggctgccaacaagagtgggtctcagggtcgtgatgggcagtctatctctcctgctttgtgatgacctggggtgaaggattggggggtgtgccatgatccccacctgccccaccagagttcctgagcagggctgggctggagactggctatctagctccctgggcaatgctagtgcaggcgatggaagagaaagaaagaacaggccatttcagaccttctgccaggaccctgggttccttccagggttacaaacaaggtgcagatttggatctgggtggtcctggaaaggtgtctgcctggcctatgatttttccaagatcaggattcctgtctgagtccagtcgctgatgagcccaaaaaccctattgctgttcaccacacatgaaaacctttattctgcagaaaagggaacccagaaataaagccatgcatctacaatcatctgatctttgacaaagtcaacacaaagaagcaacggggaaaggaccttttattcaataaatagtgctgggataactgtctagctatatgcagaagaatgaaactggattcataccctttaccatatacaaaaattaactcaagatggattaaagatgtaaatgtaagacctcaagctatataaaaaaaatcctagaagaaaacctaggaaataccattctggaaattgcctttggcaaataatttatgacaaagtcttcaaaagcaattgcaacaaaagcaaaaattgacaagtgggacctaattaaactaaatcgctctgcacagcaaaataaactataaaccgagtaaatagacaacttacagaatgagagaaaatgctcacaaattatgcatccagcaaaggcctaatatccagaatctgtaagaaacttaaataattcaacaagaaaataacaaataaccccattaaaaagcgggcaaaggaaatgcacaggcacttctcaaaagaagacaaacaagtggccaacaaacatgaaaaaacgctccacatcactaaccatcagagagatgcaaatcaaaaccacaatgagataccatctcacacgagtcagaaaggctataattaaaaagtcaaaaaacaacagatgctggtgaagctgcagagaaaagggaacacttatacactgctggtgggaatataaattcgttcagccactgtggcaagcagtttggagatgtctcaaagaactaccattcgatccagcaatttcgttactgggtatatatccaaatgaaaataaacagttattatatcagaatcttgtggagggaaaaattaaaaaaaataaattgtcctaccaaaaagacacatgcacttgtatgttcactgcagcactattcataatagcaaagtcatggaatcaacctaggtgccaatcaaagatggactagataaagaaaatgtggtatatatacaccatggaatactacatagccatagaaaagaatggagtcatgtcctttgcagcaacatggatgcaggtggaggccattatccgaagtgaattaatgtaggaacagaaaaccaaataccacaggttctcacttatatggggaggtaaacattgggtacatatggatacaaaggtgggaacaatagacagtggggactaccagagaagggagacagggagggggacaaagggtgaaaaatgacctatcgggtactatgctcactacctgggtgatgagatcatttgtaccccagacttcagcgtcatgcaatatgctcatctaacaaacctgcacatgtaccccctgaatctaaaatcaaagttgaaattatatatttttttaaaaacctttgttctgggccaaagtggtcttattagaggcgttgtggtcgccctgatgcaaaccattaagccactcagggctgtccagggcctccaggagcccccaccacacaacatcatccccagacacttgtttcaccttgcatgtttccagggaccctgagggaccctcatcatcagcttttgtcctagccctagaagtccagtcttcaacagaggactgtgtccataactcataaagtttatgggaggattcagggaaccaatacatagaaagctgttatagtagtgccttatttaatgtgagcccttaataaatgttagctaatgtcactgtgcacttattattttttgttgtgtctcacgttcgctgtgtcatgaaattaaatgaccctccccacagagggttgaggagtataatggttgatagcatgaagtcagagagacctgagtttgagtctagactcttcacttactagctgtatgacttggggcatgtttcttaacttctcttagcctcacctataaaaccagtgtaatgatgtctactttgatgtgttgatgtgaagagtaaataaaataatgcaagcagaggtcctaccatgatacctgttatttactgaatgattaaacagtatggaaaacatataacttgtaatcattgtttttagtagtatttctgcaggatatgcaatttggttaggggatgggatcatgcatgaggaatgccaaaacagtgtaacagaccatatatttccaaggagcttcaaggcaaggggagctgggacatgggacagaaggcaagtgaggcgtcctggagggatggtggggcaggactggggcagaggagtagagaggtaggtggggtgcacgtggagaattccatagagaggttctgtgctggttaattttggaaaacactccagtatttaaggagggaaaaagatgaagataattgtcttaaagatccttgtgcaaaatggactctggaatttagatggggagttacgaccacagtgcattcagtcctgatgacctggcatacatctctgacaaggtgggaagtctgcaagataaatggctcaaactaagctcattatggggaattttcccaggagaaggaggagtgaatattatcaaatgggctttgcctccctctctcttgaagcagcccctccctacctccaaccaaccaagagcaatgctgaaaatgattaacaatggaattggtgcttggggtttgcccatagcagctgacgggcctgggaacattctcaggcatgcacccctcattggtccagggccactttgcactgtcaaagtctctcatctcacaggtgaggaaactgagaccaagtcgggcaggaatttggcaatgtgacagagcaaagtgttaacactttgctgacttctccagttcccattatgacttggtgattaagaccagtattgaatccttgctcggctgcttgttagtggtggagtcagagacaagttcaatacattctctgtcccatcattttctcatttgtaaggtgaggactccctccctccttccttccctccctccctccttccttccttccttccttttcttttctttgtaggataaccaacttatttctacaaacccagacctctcactggtttcagactgaaagtccagcatttcagaaaaacccttgccccctggcaaatcctatttgttcaaaaataccgcctcactttgttctaggtgctacagatacagcagtcactcagacagagaagatccctgttctcaaggagcgaacgttctaattctataaggtggagagagacatggatatgttgatgaatcagtaaaataatgaacattctacaaatgtgaactatgtatcaggctctatactatatgttttacacatataatatcattatatttataaacaattctaggagatagatagcaatactaaccccaccccattttccactgtgaaaactgaggatttgttctattaacaaactttcctactgctggtcaaaggcaaagcatctaaaccccagagttccaacacacatgttctcaaccttgatatgccaccatctcacgaatggcaagtgtaagaattagacagggtgaggatcatgttgatttttcctatctcagctggctggggatctcttgtcctacccactaggctgcgtggcagatgctgtgaagggtcctctagagcgcatttgctccagctccaagcaccagtgcagatgctggagcccttctttgcaatgtcacttctatcctagagaggtttagtggggaagcctgatgaccacagcagcttacccagcaaacaggaaagcaagagcacatggaacctgcgggattcctggagctcgggagttctttggctttgagtggctttctgccaagaacgtctaccagcagaagatggaaaatgggtgatgccctagtgctggccagagttctgtgccaaaagagaaaatgaggccattcctctcagaccttcagggctcctggcagatgacaggctgatgaacaagtactgcctgagcttgagaaatatttgccgttctcaaggctgactgttctgtccatctacccaaccacatttatatgaaacttatgaactaatattgttggaagaaactttattcatcacccagtccaagggtctcattttacagatggaaataaaatgacttctcagggtcatacaggttaccaaggaagagaccacaaggaagaaacaggttaccaagtctgggccacaaattgctgaactcagaatgcacagcagttctgcaaaatgcactgcttctccttgtggctggaccttacaattatttatagggaaaatgatttctctcttatacactttccatgtttatagaaggaggctgtggggccggggagtggggctcagggttcagggatcactggctaataatgtcagttggaaagggaactctggaaagtgtttgatatgtcaaacaggtgtaaaaatgctcttaagccaccaatgaggtgtgagttagggcagaaagaagatagtagagtatgagaggggaggaggggcgtcctgagttctcagcccatgctagactacagggagtttgagtcttagactcctgcttcaccattgactccattccctacctcatgcccacccagcaactacatggcagaagatacagggaagagagccccggactcacaggcagaatgggccaggttcagatctcagcttcactgccaccagctgtgtgatcttcagcaggtctgaatccctggcccctgctcccatccctctctttatttctgtttcctcatctgctgaaacatctaagtttcaggtttatggggcaggtcagagagcaagtctacaaaatgcttatcacatggcctggccaagaaagcccctaataaatggcatttgtcaccactgttggtgggaacctcacaatacctgactctcctgcactgcgctgtgaggaacagcccagcgtgctcctcctggggttctccccaaccctggagtgaggcttgcagagcgggcttgcaaagcagccacacccatttgctctgctggcttaagcaggagccagagtctgctctccaggggctcaggatggtgtctgaaacagaacacatggagtccgccaggtgtggcagtaactacattgacaaaactctcagcactacaaagtggataaattagagggcagagaaaatgcattcatgctaggaaagcattcgccatacacttcctttaactgggagcctctctagagaacttaaagtcaaatttccacctcccaaaattctatttccccgtagatatctaggaacttgcctagtgtgaagtggataactgtggagacgctgtcatctttcccttcatcccattttctccctttcctatgggaatttttgatttaatccgggcattgtggacagcagagagaggatgcaagtgctggttggccatatgtgcttggacaaagctgcctgctgtctcgggctgttcaattcactgctgctgtggccttgggccagtgagcaccctgtcattctaagttaccctcaactggaacccagactctgcagaggtgtggtgggcagtgaaggaagaagagcaagcttcgtgatgaccatgcagacacatgccatgacagtcacttcttgtttagtgcctcctgacccctacacttcaggcagtcagaggtcagagatccatcatgcccacctcccagcttactgtctctatactcagctgagcagaagaactcagggccagtgtacccagggctgggcttcctgccttccctgcttctctggccaccatgctgcagggttgatgcctcaggcctttccagtgcatgggcagagaaagggttgaaggcagcagatctggattcaagtccagctatgtgacctttgcctggttccttaacccttccaatgctcatttctcatctgtaagagggaggtggtcatatctccataccaacttgcacaagggttgaatgaggagaagaatataagcgcaaaatgcactgaaggcaccccatgcatgacacttctcgtcctcccctccagggaaggccaatggtaacccagaaatcactggaccatagcattcaaatgaccattgagtccctgcttctggtgtacagaacaaaggagaaggccacatagagcttctttcttccaagactgcagaatggggattagacctctcaggggagtgtggtgcaagtcacaatagctctcttctcccgataactgtggccatgtggcctcgtctgctgcccagtgtgacctcagcctcaaagccccactcctaccttagaaaggttgggttgaggatcccccactccacattctgggattgggcaccacgttcccctcatggctggggcagctctgcttccatggcccaggttcttctaaatccaattctgggtgtctactttccaaatcctcccagactggggttcagttttgacttgccctggccattcttgtgcccatggtatggaggctgcaatccattgacagcactgtcactccccttttccaccctgctctacccaaggctgcgtgggtggccactggatttcacaatacttctttggccagtggaagatctgagctatagcaatatttaaaagatcttaagaagtcacaaaatgtgtatgtgccccgcaatgacaagactttttttagatgcagaaggctctaactctaataaattattatccaaatacaggaaataatcactgttaacattagtagatctcttgcagtgatgttttgggagccccatagactatcatcgaagtcagggggttcttgaactcggttaggtggttgagtacctgaaagtttgtgtcctctttacagaagcaaaaatactgttatttaattcaattgagaggtctaaaaatacaaatgtaggtcaccctatttttatgttttgagcactgtactaagtgctttatatggagtagttcacttaatcctcacaaaaaccttgcggaagtattacaggttaagtctcccttatccaaaatgcttgggaccagacgtattttgaattttgaactttttttttgggatttttgaatacatatttgcatatagataatgagatatcttggggataagccacaagtctaagcacaaaatttatatgtgttttaatataccttatacacatagcctgaagataattttatacagtatttttaatagttttgtgcataaaacaaagtttgtgtacactgagccatcagaaagcaagggtgtcaccatctcagccacccatgtggacaacctgtggttgctttgtgccaccattattcctgactctgaattttgatgctacctaaagcaaccattttcttatactgattcatgcataagtacttaagagtaaaaaataggacagaccattaatacggtgggaaaaatcatgtattcggggtaaccgagcagcacagtagcatcaccagaatacctgtatctgctattaagcaagagcaatagcaaacaatggcaggctgattacctgccactgtgtgcctgcattttgttgtgtgcctgcattttgactgtgactcgtcacatgaggtcaggcacagaattttccacttgcactgtcatcttggtgctcaaaaagttttggattttttttttttgagacagagtctcgctctgttgcccagactggagtgcagtggcacaatctctctgctcactgcaaactcagtctcctgggttcaagagattctcatgtctcagcctcctgagtagctgggattacagtcatgtgccaacatgcctggctaatttttgtatttttagtagagacagggtttcaccatgttggccaggctggtctcaaactcctggcttcaagcgatcctcccaccttggcctcccaaactgctgtgattacaggcatgacccactgtgcctagcctcaattttggaacattttgaatattggattttcagattagggatgctcaacctgtgtgatcactcactaaggtctgaatgctggtgtcctcccaaaattcttatgttggaagaattgactctccaatgtgagggtagtaagagctgggtgtgagctttgggaaagtgaataagccatgagggttacattctcatgaacagaaatagtgctcttataaaagaagttgaagggaactgcttcaccctttctgccatgtgaagacacagcaataggcactatcaatgcagcacagagggagcctttccagacacctgatctgctgctgccttgatcctgggcttcccagccttcgggactgtgagcaatacatttctactgttaataaattacccaatctatggtatttgttagagcagcccaaaagaattaagacactattatttgttgccatttcataaatgagcaaattgaggctcagggaggttagatcacttgcccagtgtcattcagcaagttgggaagcagtgaatcaaacccagaaagtcaaatcagtttcgctgcttttattccacagttcctgccctcccctgcctacccctgagaatcagaagcaatgtcatcagttagatatgactatgttatgcataagccatatcaaattacagccgttaacacatgggttgactcacacacaaacaacagctcaaatctaggcaagaggtatcagctgtttgataatatttgtccgctaattttgctaattgtgtgctcatttgtcatcctctagtgagtgacagcaggcaaacagtaggaggcaccaaaggtttaagaaaaacatatgggagaaaagcttaactgggaggcttttctgtcttagctttttggtttttttccccctgccaactggaaaaaaaccacaattattgcatttctgagacagaactacctgctctggttcatggaaacccatgttatttcagagatgccaccctgctgcccattggcgacctttcgaaggtgctctcctggtgttctaactcaatgtgctggacagttgtgcctcttcccaccagcatagtgtcctggtacggcagggactctgcagcgtggggggcaggggcacttcaggggtgggtggtaaaagctgaccagaactgtgcagctctgttgtggttcccaccctttgtggagaatcactgctctaaggtgacccatgcctcctcccatatcctctacacctatgctctttatgatatgacccactctttggttggactagggtcaacagctggcccaagtgcagccaaaccatagactgggcaggaagcaagggctctgagcttcacctcaaaagatgaactgtgcctgtcagacccctctcttggaaatgtagtgtcagggctccggaggggtggagcttctgcacttcaggggtacatgggggtgagctgggcaatggccacaatgaaccagagttctcgaggtgcaggagccatgtgggagtccagggagtcagcgggtgccagcaggaaaatggagcagatccacagatggaggaggggatgtcaggggagagatgagactctgagggactaaccaggcaaaatagaagtttgcagcaagtaatagtagtagaagcctgaaagtctgttaggtaaccgaggctgcaaacatcagcctttcctgctcctggcccgtttctgggaggtctgcatgtagggaggcgctcgttcttggattctcatgaaattttccttcttctttcttggcatctttatcatgacccacccactcgcatgcttttactcaaaccagatagcactgccttaaccagggtgcacaagaacgctatttgagttgctggggcctaaactgcctcagtaagtgaatctctgcctcccctcagaccccccattggatggtcagaatctgcaggagactggctcagctcaccattccactgttttgttccctcattagctctgttccccagttagctcgccagcccctttgccttgccctgccctcccagccactgcccccgaccgagctgtttacatggctttctacattaggttagtgctcactcccaagttcccaacctcctacttgactgtgtctcccactgtgatcctttccttagctcctgcggagcctgggctcatttacatttcactcaccaacctcatttaggtaattttctacagttaattcaacgttcaccaagtagccctggattgcatttgcattcatcaccttctggggctctgaagcatttcagagtatacaggcttccctgctgagatccccacttacgcaaacgcaacaacaaatctcgtgggctctgagcagaagatcccgctgcagggtcagcccagtattctcttctgacagcagcctcaggaggacaggaagtgccctttgtcctgccagtcttgtccaaggaggaggtgccctgactctggccttcctgtctcctattaattcattgtgaatccatctctaggtttactgcctgccgtgcaaagcatttccttcaccttagccaaaatagcctaagcttcagggggtgccatctagtgcctgtattattacaaagcttgggaagtagaaaatatacgataaaaggcttcacaatatcagaattgaaaaggtgtggttgcttgtgaacacagtcacagagagcccttggctcataacaagctacttcttggtctccactttgctaactggtggtgggcgtcatggctataagactctcaaaccagcacagcaggcctcactgtcgatgggtgctgtacaggacaaactttttgctttagtcttctacaattgttcaggttagtaaaagaaaacttgtgataatagaagtttgcagcaagtaatagtaatagaagtctgaaagtctgttaggtaaccgaggctgcaaacatcagtaattcgtctttatccgcaaagcagggaaaacgggactctatcacttacgggtttcccctgcctttgttgtatttcaggaattactggaaagaaattgtctgacctggctccttttgtgtttcatttgggcctcaaaggccgtatatttgtaagaagaatgtcactgtctatgtcaagctttctggacagaattctagaaattcacctgtagcttgttcttattccatactgtgccaccctttcacaaccctggttcagtttgttttaagattttctatccaggatctcagtggctgagatgttagtccccatcgtgcttcaggtagtagaataagggctggagaccagagcctgggcccaccatcccaccatcgctgtctgtgaatatgcctcatgctgtgagcaacacaataaagtttgcttcaaacaaaagtatcatttccctgtaggaagccaggtaaaagtgctgagaagtaccactataacagttccttctctctctaccctgagggatgaagctcctgcactgcaggggtgtgtcgaagtgagcttggcagtggccccagtgggccagagttctgggggtacaggagccatgtgtgagtccagggagtcagctggtgccagcaggaaaatggagcagacccacaggtggtggaggggatgccaggggagagccggggcccagattttacaactcccttgtttctttggctgcctagtgcagatttatttatttgtttgtttgtttgtttgtttatttatttattttagacggagtctctctctgccgcccaggctggagtgcagtggcacgatctcggctcactgcaagctccgcctcccaggttcatgccattctcctgcctcagcctctctagcagctgggactgatgcagttttactttgcatctcttcctatgtagcaggatgagccgcagaaaagaacccctcagaaaccgagttgtggaaggaaagggctttattcagctgggagcaccggcggactcacgtctccaaaaaccgagctccccgagcgagcaattcctgtcccttttaagggcttacagctctaagggggtccgtgtgagagggtcgtgatcgattgagcaaccagcgggtacgtgactgcgggctgcacgcaccggtaatcagaacagagcagaacaggccagggattttcacgatgcttttccatacaatgtctggaatctatagataacacaagcagttaagtcaggggttgatttttaactaccaggcctgaaatgcagcgccgggctgtctgactactgatttcacttctgtcttttctttaactcctactttttctttgaggcagaaattggtcataagacaatatgaggggtggtctcctcccttacctctagcttgatgcaaaggagggctggtatccctgctttagcaaagcacagcgcttctccaccccttaagctctcttaggcagctgacagcagcttatcaaacacttgttctgtgtgttgtcaactgggagtgttctcaggttcctctaagccaccagctagcctgaaggtgcagtctgggaaaaggactgctttgctgaatccctctttatgagctagaagggccttctgaacatgggccaggctccatcagtttcagagcgggaggtggtggagtgtatctactcaaaactgcatggggaatgagcgctgttcggccgttctcaacatttcctttaagaaagtaatgttggcgctgattccagtagacctttaaaaaggctctttattcaagtcttagaactgattagatgagagccatgctgggtctgtcgggctcaatttatatcctctctacttctgggctcaatttatatcctctctgcttcccaagagggagctgagccaggccaggtaggttccccagaataggcagggtcaattccaacgccaccttcccagggtgatctggaatgggttctttctccctctctctcccttcaccaggtgctcctgcagaggaacctggtgtcttccccaccccaggctgcaggagctctctgttcaatgcagtatccactggccacatgtggctttgagctcctgaaacatggctggtctaaactgagatatgctataagtgtacagtacacatcagattttgaagacagtatgacaaaaggtgaaatatgtcatgaatattgtttatattgattgcatgtggaaatgataatactttggatatatgaggctaaataaaatatagtataaaagccaggcatggtggctcatgcctgtaatcccagcacttggggaggctgaggctggcgggtcacttgaggtcacctgaagttgggagttcgagaccaccctgaccaacatggagaaaccctgtctgtgctaaaaatacaaaattagccgagcatggtggcacatgcctgtaatctcacctatttgggaagctgaggcaggagaattgcttgaatccaggaggcggaggttgcagtgagccaagatcataccattgcactccagcctgggcaacaaaagcgaaactttgtttcaaaaaaaaaaaaaaaaaaaaaaaaaaaaatatatatatatatatatatagtatgataaattaatttcccctgttttatttttaaaatatggtcactggaaactttaaaagtgcctttgtggcttgcattaaatttctattgggcaatgctgtcctagaagcattttagactgcagaggtttagagatttacagctgagactctgggtgaagagcaggaatgagaaagatcaagaaggcaaagattctgccacttctctgctcaaaactttctaaattttgattccttctgattccttcctcaagacctctgaggtctctaaggccctggaggccttgcacaggctggtccatgtcctcccaccctcgtatgtctcctggagctccagtcaacctgaccttgcttttcagcatagccagccatgcccatcacagggcctttgcacatgctgttacttctgcctaaaacactctcccctggacagttgcatgcttagaaagtcacctcctcaaagaagccatccctgattcacttcctcaatcccagtcagaaccaatcactatcccttcaccctgctttgtttttctttaaaattcttattactccctgacattgaattgcatgtttactttctgtttcctccagacagggagcctctgtctcttttattcaccgcagtgcctggcacatactggatactcagagaatgcttgttcaatgaacacaaacatcaatgctgcaaggccaatgagattcagccatttttcaaatgaataagctcaggcttggaaagaggtgagtacgggacagagcaggaattgatttcagcgactgcaccgagctgtgagggacagtggctgggtgacctgggaagtcacctcttctaggacctcatgcactgggaatgtgccctaatccaggggatgaggaccaacttagcagggaagaaaataaaaccaagagaaaaaggccactctgacttgctctggacatttcctgtgggaaacagatgtcaggattaaaaggaaagagcaggtgtgaggtctcactcgttcatactccggcatcacagaatcctttgaggaggcacgtggggccaacctagacaggctatcaataatcaaggtccttccagatgcacgaaacaggccttagagcctcagagctgcaggagattttcatgcctgccccttgggcacatcccaagatcaggagctcactccttccaaggcagccgagctgttagtttttctgttcactttaatcaacagaacgtatttgattctttcgggtcagcagcgactttcttgtagttgatgtttttcagacacttgttctagttttggacttctgggggcacattgaacagactaattcctgctccctagatcagcccttctgagacagaaggtcacggtggctgagaagctgaacttcccaggaagcacattctcggcaggcctgccctgtgatctcacctgcaaggggacaatttggaaatcaagtattatggcttagcaattcgggggctgattctctgaggccacagccttctccttgctcacccagagtaatgccagttcgaaacggccagcccgacttctcttctgacttccaaactcaaacttgcattttcttgttactttagcaacattgattcaagcacttgtgtgtgccaggtatgatgccacaccttgaggatagaataatgaagaagatatagcccctggtctcggggagttcatagtctttgtggaaaggctgacaagtccacaaggtattaaaacccagcaggatccaggctggaatgaaggcaactctcaagggcacaggccgtgggcaccgaggaggacctgacacaccccgtgggatgcaaggaggacaccctggaggaggcaaggccaatgctgccaatttcccattgcctaccggggagttcagtctgtaagtcccacagatgcttctagtgaaacccatttgtcatcttaatcaagaaagttcaaaatcatcatctcatgctttctttccaccttagcctatctccaacacacttgcatacacccacatgggtgcccatacatgcaaacagagtcacttctatctccttgcctaatctttctcaaacctgtccctccccctcaagctttccagctcctatcaattctcacagacctgtagtgccatactccccactgctccatccctctgccaccccattctccactgtgctggaaaggtcctcatacatactgacatgcaaatgaccatggatccctatttccagcaggcaagactccccagaagctggctgtctagggccctgggcagcctgtccagcaccatccctgtgagccctgcctgcaagcctcaagcgccagccatgctggcatgcttgccctgccccaaacaatcatgtcacactcgttcccacctctgtgctcctttacacacactgccccctacatctggaacaccctgccctttcttttcagcccccaaacctcctagtcatcctttaaacccactcaaatgtcaccttttctgtataacctccctcggacagtcagttgctcttactgagaaaagaatgctgtgccatcatagccattatcatcagcccactagccaaggggcttctccccacctccaggctgggactctcagagagcaaagacagtgtgtaattcatctgtgagccccagaacatagcagagaacttagtaataacattaataaacaatgctattatttattaatgatgaatacaaccagcaatagcaatgaataaaaatactgatgaataataaggaatagcaatgaaaatacctggcatcatcatgatgatattaccatccatggtgccaagccccttgctaaggactctataagaaagatctcatttaatctctcggtatcctctaaaatcctgctcccacattgtggatgaggaaactacagctcagagggtataaatccctctcctggggtcatactttttgtaaacagcagagacgagatttgaagccatgtccatctgatctccaagcttgtgctgtgcgctttagccactgtgcttctctgggacacaaaaagggatactgaattaattaccacaggtgctagagagccagttcctcagaacaccttatctgctgcaattcctgtgacctttcagtatcaactcaaagttatcaattaagctctgtctctagggaggtgagacagggctctcattccatgagatctggctctgccaatctcaggctgtgtgatactgggcaggtgacttacctctctgggcctcaggctcctcatctataaaatggggacatgcaagtccctaacccagaaggtcagtgtggggatcgaacaggagatagcacatgaagagcacaggttgagtttgtggggtgcgggggcgtttggtaggacagtcagtggtttaccaaaccaaagtgcaagctgaaagtttcggaccccagggatcagtgaaagagcttaaagagcccagtctcagggatcagtgcccacaaaggtctggaattctggatgtcaggataaagagagttgacagggagactgagattcaccctcaccctacacggggatgttttcctctgaccccttttagcttccttttttggactgcacgtggtctcagaacggggcctccacagcccaggcgaggtggtctgtggacatggctcctgtaagtgcccaccagacagagtgtgaggcagccaagctgaggtcggcactggaagagcccaagagaaagcttgggaggtccatggtggccactgaagtccagaagacaagacagacttaggcaggccagaagggaaactactcctctgtgaggggctgggaggacagaggaggagcccaggtgtcctgtggagaactgaatttcagaagaatttcttgggggctctggagcgccccgcagaaccacctcaaggcaagagcaggaaccaagaggcctctgagttcttgctgtatgacttggaaaaatgttccgcccctccctgggcctcgtttcctccactgtatgatgagggagtgaactctgagatcacgtctatatcgatcaccatcattccatgtgacctgaagagacaagcatgaacacatcgctctaagcctcagtttcctcatgtgtacagcaagactagaaatggctgtctgttaaggctgctgtgcgtacagtgcctgggaggtagcacacagtaggtactcaattaattcccaccctccacctccaccaagcccaagcggagagagttagagtcctcctgtctgtctctctcccttcctcagtgactctgggaggctggggttttcacccactatgccagcctagcaactggcaactgggccatccctgctgggaaatgcctctttttggagatgaagtctcactctgtcacccaggctggagtgtagtggtgcaatcttggctcactgcaaactccgcctcctgtgttcaagtgattctcctgcctcagcctcccaattagctgggattacactcacgtgccaccacacccagctaatttttgtatttttgatagagatggggtttcgccatgttggtcaggctggtcccaaactgacctcacgtgatctgcccacctcggcctcccaaagtgctgggattacaggtgtgagccagcatgcccggctgaaaatgcctcttttgaatcagagctcttttttttttttccccatcagaatgtaatgtatactcattaacagagaaactggagcatattggagaaaagaagaaaaataaatcacttgtgactctactaacatttcatagcatgccttcctttttctatgcagagtactccttaagtgggtaaggtcattttcaatattcaatgtcatttcctggtttcttctacttaaggctatcacaaactttcctatgttggtataaacatatttttaatggctgtcctgagatttccctagccagccctatccacattgccaggtattcatgaagtttccaaatgtccagtcttctaaaagcaaagagccacggatatttaattcattgagagttttgtttgtttgtttgttttcccccactgcttttagaaaatttttttttctcttagcacaaactgccagaagtaggcttctggtacaaagcagatgatgacttttagggctggcaatttctgtcctttgtgggcaacattgccattaacttactgatgacttggggtttccagagtcctggataaagaagaaaggagtttcctagggaacaagcctaaatctcctgggaagaatcagtgagagcctttaagtttatttcctccttttctggcctggtttgaatagagccccagggcaggagggtttttctgagctacctgaactttaaatacctgcctggggcttcctttactgaatcttatattttcctccctgtgttatgccaaggtctgggagtttggagggatgccctaaacgggacaaaaaggggttactggggatcagggagtaggaagctgggccagcaccagagcccctgatttcttcagctgggggctccctccttatccaccttcaagttcactgccccctaccacacccaatgtccctgatattccctcccaccaacgctagaggctgtttccaccatggctagactctggtgacagtccatttagctggtgagggctctgaacccttaccagctcctactagctcccttcttctggaaaaggtgtcatgttccctatattcccagtaataatatctgagatttataaagcacttgtccttaatactctgataaacttcccttgtatcatctccagtcatcctcacaacttcctccagatgagctctatttgtcaagggagaaatggaagacttagagatggagagttatttgcccaaggcaaacaattagcatagggtggaagtgggatttgatccaggagggctactgtgtatgcagtgcctgggaagtgcccagcctaggagctggccatcagtaggtgctcaattaattctcaccctctacccacctccaccaagcctgagaggggacagctagaggcctcctgcatggctgtctccctgcctcagtgactctgggaggctggggtctttacccactatgccaggtggcaacctgatcattggaccatccctgctggaaagtgcctctgtgctcagactctggcctctgctctctccccattgaccggggtcaataaccatgcagtacagactgtgcttattataacttctgtgggcactgcccggggccagccctcccacccaggcagttcctgctggcctaggtcctcctttgaaggcttacttttcatggtccctgccagcccattgttggggcctcaccccttcttactgcccagacatgggatgggacagaaatttctgttgttctccatagctgttgtcacaagatagtaaaactataagcttccttaaatatcacaaggacatctcccgtttgcctcatattcaatatagagtcatgccatgattatctcattaatccccccaattgccctgtgcagtagagaaaacgaatcagagaggtcaagtaacattctcaaggcagtactgcccattggaaattgaatcagaactagaaacaatatctcttggctctaggcctggtgatttttcttttattcaatctcttgttttttagaagagagctgaagttcagagaagggaagaggctatctaaggtcacaaagcatgtcagctgagaaagcctggaactagactcctctaattccctggatcccctgcataaaaagcaaacagagcgtgaatgaatcaagaaaatgcacactacagagtgcaggctcttccaaatcctggagacaaactggctgtactggatttctacagtggagtcaattccacagagctggtgtgacccactgtggactccagggctgggatgaagtaccacaggatggtgagcaggcagctggaaccagaccgctgtggcaacaaggtgtccattcactgttgcccacggcagagcaggggtgtggccagcaatgctttcctctgaatctggctcatgggacacatgatttctgtccctgctgcagtagctccctttagacacaagttgtaaatagggcatttgggaaaggtggtgctgctggttactgttgaggagaccagggttcttatttgcccagaggaaggccagggtatcggtcatctcatcaaggtgactcctgagaatttggatgtgaataatggcagggataaaagaaagaaaaggaggagaaaagggcctaccctgcgtactcatgcatcctctcctttaatttctcaccttgacctaggagagcaatacgctactctaggtaagccattgtccaaggtcatgtggtcagcaaacaaccctaactaggcagcgtgcccaactccgaggatcataaggtttctattccacttcctgtccccacctaaccagtaagttggcccttgggcttatcatgagtgaggacttcagactggttcactccatgatttctatggtaatctttaacatattctgggttccctgtagaagctggttggccagactgtgccatccagctgcaacagcagtttccagagggatcaccctgaagcatctctatcatctagtgctgctcttcactgagcaaggcctaatctcaggattgaggaccccacagtgggcctaaaggcagagcatggataaattgcactgtggtttcagatatgagtgatacataaccccctccctccctccttcactccacatccatcccttccttccttccttctttccttccttccttccttccttacacattaaattgaacacaacaatgcactgtagtaggtacagtgctggagataaaacagttgacaaaaatatagttcctggcttcccagagcttggatcctagcaggggacatagttatctctcacataatcacaatacacaaatctttgcaaattgagacaagactgttaagcaaaacacagagtattttaaagaacacaatgggggatctgatctagtcttggggtgtcaagagaagcttggtgtttgacctgagactcaaaggatggtggtgatgcactgtagggcatatgaccgccccgtggcctgctccctagaaaacagaaagaaagccagggcagctgtagcccagacggagtgggcctgaggccaagcacagcctccagggccaggctgaggtgtttagattccattctaagtgcggtgaagaactatctaagtgctcaggcagcgactggcagtgtcagatgagcagcaggaaaagatcttcctggatgttgtgcagagtggagaatgaggggccaagagctgatgcagcatgaccagttaggagtctaagtgcaggagcctaggtgagctcaactgtggtggaaactcatgaggggccagacgagcctccagccctgccagggagtcctagtgagtggttcagggatgagcaggaaggacacttgcagcccacacagacaggagagtctttcagatcatccctctcccagacgccctcagaagaaaagcttcagatctgccccatcccagtgggatcctgcaggatgaacccagagtggtggcaaaaagggtgcaggcactgcaagggaggcagccgtactgcactaccaggggcttccccagggctgaaaaggaaccccaccttatccatagcagcatcctggagcccaggtggctcatcccaagtgggaccccaagagaaaggccaatagagacatcatctgctctcagtcccagacttagagatgcagctatatccaatggaagtagatagagggagctgggggtctctggctcagcatcttctccactgggggcaaagaaactgggacagcagcagtggtccagagagaggccagcccacagagcagtggctatttctatctatgttggctcagagtggagcaatgaaagaataaaggaatgaaaaggaggtcaaagggagtttgggaggggatcccctgtgcttctgcctgggacataagagagaggtttgctcatggctggagtctgaaatcagaaagcacttgcaccaggacagggcaggatgctgctgtgagcctgcagcttccactttaagccagagaaaggctgtttggctgctgttactaccaccccggggcaactcaggctaggaaggcaggtgttgttggggagatatataacacaacattcccacagagcgttttcagggctagaatatacgtgtaccgggaacaaataaacgaggtatctggacaagactggcaggaagctaggtgctttgagtaggctgcaggaagagacaacagctggaccaagtttccaaggacagatgagaggtcgccagttggggaagaagggagaaggcagaaaaggtaccaaagttgcgaggagtaacttaagcaatgcctgaaagcccctggagagctggggaatccaagtgtcacagtcacagcttgataggtgggttcctgcagcagcagcatcactattcacctccttctcatgctgaagaggggaactcaacccctcctaggcccaagtagggatgtgccctctatcctagaatgtcttagaacctgtggaagtcacctaatgatggaggccttatttcacagatgaagaaattgagacccagagaagtgcagggtctaactcaagttcacacaacagccaatggaagagccaaggccagaactcagaccctctgccttccacctccttttctcctttacagaagctgccctttttctggttgggtgacatgagagtgtgcgggaggcaggaattggacagggcacacgaagtcactgattaatgagtggtgagtcatctctcagtgataatcactatggaaacgagtggcagagacaaattggggccctgaagtcaggggtctagttttttcattcctgacttcacattttgctagaggaagatggtgtgtgttgctaagacatggtttaagttgaacagcaagggctgtacttagcttcatcagccgagcaatgaaggccagctaccatcccagttttagaaaatgtgctctgtgtcacaggactgaccccaaagtcccaaagaggaacttgcctttagggctttcagacctatgctctccacagtaatagttgggtatcaccattccagaagcattcgtccttcccaaagtctcaggatgttaactttgcaaaagatcttagaaggtgtaagttccgaccttttatcttccaaacaaaatctcatttaatctcatgcaactatgaggtaggtactattgtacctattctgtatatgtgaaagctaaggcccagaaaaaggaatgatctaagatcacacaatgaggaaatgatagaatggaacttctgaattctggacgagccttttattcttttattatccagtacagtaaaaatataaggtattagtctatctgtctttgcccctgcaagggggaaagaggagaagcgcagggaagaaggttgatattgtaatggagaaaccgcagaatgagaacccacttccccatctgccctcatgtccgcacttcatctttgaaaactccctataccgcatgtttcaagagagacacaaaatgggagacaacggaagaaatgaagagagaatatgatcaggtgacatttgcatggcactttatagtttgcagagtgcttccacagccctccctccatttcatcctcaaaacaaccttgcccagtaagagcaggtgcaagtacctctgtcccaatttacagttgaggctgcagaccctagaaggttaacagacttggattcaaatttaaacctcctgacaccaaatcctgcagtttttccatttacattgactttcttttgcctgtgcacgagtgaaaatataggagaaagaagccaacattcattgaatgataatagtaaaaaaaaaaaaaaaaaaaatggagaaaataaccacagctgctagctctcattgtgcatctgctgtacacaccaggccttgtgctaaatacatcacatgcacctgatctcttaatccacacaccaccttggtagggtgagtattgttatccccgttttattggtgaagaagctgagattcagggagttctgtgcttgcagtttcttcttctgattcaccctcggagtgttttgtttccttgtaattcagttatttttaactataaaaattcttagaggtttatttgtggaaaccacttgcgtctgaggatgaaggcggatcctagataggatttgtgtcagcttttgacaacctgagttactctaaaagaaattcttgtcttgaggttttcagatcactcaggtggtatcacaagttctgtctgaaaacctgtataaggacttgctgatgtttctgaattttcagctgcaatttattgaccacttccactcaatgcctacatttaagattgtttattttccttgcacttcccatggagagataatatctgattcatttgtatcctgagggtgtgacccatagggtctgagctttctgtggagaagaactcctatgagactacccagccctgggcagcaacagcaggagaaacagcgccagtttagcatgaactttcatatccctatctcattagcctcaggaaggagccttgatcattaggaatgcaccaaagcatccatggtggttcagagaggagactggtgctcacagggagaggcagacagataaaagtaagaagaagtggggaaaggaggtgaggccaaggcagtcgagtagggctggatggagaggagaacctgtgaggagaggaaggtgagtcaggggagcgccaagaaaacagggtttcaggagcgtgtgatgtgggctagtctctgagctgtgctttctttctgtgccaaagtgaaacacttctgccctgcctgctcctcagggttgccctgccagagagatgtactgagaatgagatgagctaatcgtgctgaaagtccattgcacactgcaaagtgctaccagactcaaggctgcaggggttgtggcctctgtccctcttggccatgatccgtgcctccagaagagtgtgatggaggtagatctgatggtaatctccaccaatgcgtaaaatggactggctgggacaccatcctttctgcttccctcacccctgagtctctcctgaagctgaacattggttccccaatagaaaaagagccttgtcctgccaagggttgctgagcatccactggaaactgtgtatcagctcttaagggctgagcagatgcctaatttaagtatgatctcatgtgattgctgctgcctgctgtagggcaactctgtagaagacagaggctgatgccaggggcagcagcttggcttgaaagctcaaggtgctgcttttccaatgtgaagtcttgatctccagtcacttaacatcccgaacctgtttttccatcttagaaagggagttacaatgtcgatttcacagaattgtctgccagaggagtgacatgggtaacacattcacaacctcaaagctcagcacaggcataagggcttgcccatttttttttttttggtggtctcaggacttgtgggctcactgatacagagcagcactagggtcatgaccaggagggctgttaactcagatggaacaaggaggcataattggtttagcagaaaataagtttggagccaggaaaatggtactagacgacaaatacaaaggataagagaaataaaaatgggagaatgggcagcaatgttgctaaccgagaatgcccaaatcagcaggcttagacatggcaagcagattaagcgggcagttcagagctaagatcaagaatgccttctgagcctagagcttcctgatttaggctgcatatggcttctgtgtcaggggacaccatggtgacctaaatgaatcccacaaatcttcaccaggtctgtttaggtctccctgaaagtttggcaacaagaagctccgtgatctgactcagctccccacaaaaatacatcaatccactttccaacgatttgcttgcatccagagccagcttctggtcagagcagcaggcagtctcagaaacaataaaccaggccctgataagtggaattcatgccccactgaccacaagtctcaaagtggacaagacaaggagattaaagcataaagatccataatcagattctgacagggaaatcccatttgtggtgcttaggaggcatcctccagcatgcaagatgaaagtcagagaccatcagaccttagcatacgacatgccactgggcaggtggatcattaactgtgattaaggcactatgcacctcctaggtggtgaattggaggaggggaccagatcctattactggtcactttgatctccatgtcacagtcaaggcggccactgcagctcaagatcctgcacatagacctgcataagtatatgaaaactcttatttggagatactcagaaggctgatgatgttgccatctgtccatcttttgagaatccttctcttgtcatcttaccatgggtgaaagacgactgggacaggttgttgggtctggggggcccgaggctggagggaaatcacagtgccctctgctgtagcaaaagtgccaacatttctttgaatgctaaaaaaaggtggaaactgtttagcctggccttgaatcagacctcttctgagcaaataaagacctattaaatgcatggtcatcaagacttagtcattggttcatttgtgcattcactgattcatttaacaatcagtgaatatcctctgtgtgcaggcacagtgctcaatgctgtgacttcatatagaaatgaacgagacatgttcactgccttctaggactcataggctagtggggctcactgcagctggcaagagagggagcaaagagagatggagaaggctgtcctattcagagtctaaacccagagtcaaaatgaagggaagcaacactagaaacaggcagttccatgtgggtccattgggaaggtggggccaggggacaagggtcatggataaagctggcatagattggcttacatataggaaagagtagcagagacagggccaggaaaccagatttgaactaagattggggagctcccagaaggatgcaggaggatgttagtctggcagtttggggtgaaggggaggagatggggcatatatgtcctctccatccacatctctgatctgcccttccctgcacctgcacccactgagattattgttataaagttctgagttccactgagtaatagaggagaaccaaagttttgcaaatctgatggaacatgaaataagagaggacatgaaatctgatgtgtagattgtaaagcaattcacagttccgtctgccctgtagcagtgtaaacatcacatatttttaatcaagatggaaaagtaaaatcaaaggaaaactattagcaccatctcatggggagatctatctttgccactccagactgtgtctcccctccctctaggcatgagtagtaagagtgttgcctgtctgtggagacacaggcagattctccaggaaaaggagtacagctccattggcgtttcgctctaattactgctcttagtgggacctctacttaggccttaaagattccaacatcaacagtgaactcaattataatagattaaatgctctaataagactcatgtacaaggtgctgtgggaacatagaagaggaattgaggatacaaggaaggcaccatagaagtagtcatatttgagctgggttttgaaggataagtaggagttcacaaaacagagaaatggagaaggaaagctcaggcaaagggacattcgcatgcaaaagccacaaagaaggcatgttcgactggggactggatagcagtccaataactcaggatccattgaggatgaagatgaatgaatttccatccatccttcaaagagatgaattctgaaaatgtctggagggcctaaagcacaaagataagttgtgttcaattttattttctggtcaaagaggaccatcaaattgcagctatttttctttctttgtttggatggggttgttctaagttacatattatgtatttttaccagtgttaaatattttcagtttcttattgctttaaacatgaattaagattataactaatatttactggatattctaggtattttagatgatttatctctccttgatcttaagtgctaactaagcactatattatttctattttgcagaataggatgtgaagggtgaaagatattggcagccccttgactgaatcttgaagcctgtaagtggcagaatcaggatttgaatctaggtccatccaatttccactgtactgtgctaggtgggtgctaagggctggactctgatggggcagaagggaacactcctgcgtgggaggaagaacagaggtggctgataatctataagctgaatttgacctctgctgtctccagcctgctttacctcattctgcaaagacaaatcatctggagaaacagattcaatgctctgagcctcactcggcaccacagagctccagagagactggctggagtgtggggatccaggctcccgcaggagcctcattttgtcagtgaagcctttagagatggcatgtggcctggccctttgcagaactggccagagatcacacaatcacgggctcagagagttgaaagggaccttaaggtcacctaatcctccagatggaaggcttctgccctgggatgcccactcccgccaggatcacaggcttacacctcaaacgccacctggcctctgactgcatggtgccatggcctcaaacactaagtctgcactacacagagaaggcgtgaggactggccctggctttagaaaacctggaatccaagagctgccctggcttccccgcttagtagctgtggacttcggcaaatgacttttcctcttggatcctcagtttgagcatctgtaaggaagattgtcaatgcctaccttacactgtgattgggaggattagacaaagcaagagaagggagacagtggacactgcatgaagataaaagcaccaagataaaggaggatgaagaagaaggcaatgacttatagcagaagttgtcacacttcttttgtgaagggccagagagtagatcttttaggtatgcaggccaaagggtcttcgttgcaactactcaattttttcactggaccatgaaagcagccacagatgatttgtaaagaaatgagtgggactgtgttctggcatgtctttataaatggacatctacatttgagtttcatataatgttcacgtggcacaaaaccttcttcttttgattttttttttcaactatttaaaaatgtaaagaccagtgggccatgcaaaaacaagtggtgggtcaaagtttcactaacttgacttgtgggtgagttttcttcagcgtaataggaatcctttgtggacacaaagtgattgtgccatgtcttttgggaaaatctctcccatggcagggcacgagcgagaactggtcacttctctgaggaccctgctcagtgcagatgtcacactgccccctagctgttcgctggccatagactagcagcttatccaggccagaccatggcttttccaactcaaatctgcatagcctggcaccacactggacacagaagatactcaatagattcttccacaataaatgactgtgcttttgtaaatttataagttttatttttagaaaaattaaaggtaccgcataccttttctatgctgctttggatgtctatgatttcttattttattccaaggaatcaaaagaattgatgaggattatttaaaaatacacattaggtccatttttacaaaccatgcgtcatgtcctccctcaaattccataggcctgcttgccagactaattggacagataagcaaagttactggcatatatgaacctcagtttcctcatctataaatgtgggatcgtgtttggtaccaatcttatcaaacggttgtacaaaatggaagagatagtcatagaaagcacttagcacactgcctggcacctagcaaaggcttagtgaggattaattattattttattattctccaagacagaagttactgtctacaattcccaatgagaaatgaaaactcagagagcctagagatgtacctccaaatcagagtgtccactttcgaatcctggtgtggccaaccccagatcctgatccttggtaggtggctgaatcaagactcaagccaagtctgactgtgcctcctgcaagacctgggtcttggagaacagtcctgaggctgccagaggcagagggctctaagaggttgaaccatagtcagaagcagctacctcagagggtgtgttaagaaatccttcagggtcattgtctctaatcaggcgcttttgctgcgtggccttcctgggaacttcaatttccctctcagcccaagcacctctagagttgattaccagggagggcctgcccactctcagtgcagacccagaggctgccgggtaattgggcctactcctccagctggagctgacctacaggaggaccaggcctcttcctccacacacaaaaagaagtaaaaccaaaatgaaatcagattccgtaataaatgcagaccacgttccctcagccaatatcgagacaaagtctattctgctgcctgtcactggaaaagtaataaagcaatagagaagtgagttataaaaaacccaaacgacggatcccccttctgaatactgaagggaaggtggggttgggagatggggcagcaatgagtggggacctggagtcccagcttgctgaagcaagccaggtccacagacatcacctccaccagaactccccatgcccactgccttggccatgtggaggctgaagttcagagaggggaagggaccaatgacagccacctgaaaggtcagaagaaaagtcctgatgagaccctgggtcccctcatctgggtccagtgctttctggggaatctgcaagggctggggtgctgggtggtcctgaaggcagctccagccttttaagcaccatccctgttgccttttgcactttctttttgggaaaaagcaagtgctggcctgctggcaccagctcagtggtggcttagcacttacatctcttattatattaactgtcagttaacaaattgatcttcagaggtatgatttagtccctcatttgtccaggcctgatctattcattgggaggtaacaagtttagagccagaaaaacctgattgtgaatcctggctctgttgcttattagtcaattaatctctttatctctcaggccatccattttctccattgtaaacaagaatagtaataacatatatttggcaagattattatgattagtaataataataacaacaggtatcatttcttgagtgctcactataaattaggtaacatagtaaatgatttacaaatactaactccttccaccttcacagtggccctcggtggtaggccctgttatgatttccattgtacagatgaagaaaatgaggctctgtgaggataaatatcttgcttaagatcataaagcacataaaaggtagaactgagatttcaatccaggactctccgactccaaagtctatggtgacctggaagctgtgccttcctgtgctgtattaccatggtccccgttcctttatgctctgtggccaatttccattttcagcttaagaaagaaagcagggccactgagatgatggagcagcagacactgtgggtgcctatacgctatacctattcttccctcttttttcttttcttttttcttttctttttttctttttttttcgatggagtctcactctgtcacccaggctggagtacagtggcgccatctcggctcactgcaacctccaccttctgggttcaagggattctcctgcctcagcctccagagtagctgggactacaggcgtgtgccaccacgcctggctaatttttgtattttttttttttttttagtggagacagggtttcatcatgttggccaggctggtcttgaactcctgaccttaagttatccacccgtcttggcctcctaaagtgttgggattacaggtgtgagccaccctgcctggtctcttcctcctttcttactgaaagaacccttttcttttcaatatcacccttgatacatttcagaggaggggagcactggttacacacgtgtgatcaatttgtggaattctattaaattgcatacatatagtaaatgcattttgtgcaagtatatcatatttcaatgttaaaagttttgaaaaagagaaatagaccccatgatatcttcaaattgctttcaactgggagagagaaagagaatgagagagaatgagagagaggagaggaagcaaacatggcaaatgttgaacaatgagtgaagagaagtgaatactggtgctcattctaatatgcttccaaattttgtgtagcttagaaatttatcaaatcaaaaaggtggggaagagatagaaggaagagttagatccttccctccatctggataatggagtgaggatatgatgtctggaacctcagtaggcccatctcttatatgcggtgctatgtgatcctaggcaaggtacttcgctgagcttgtttcctcattcttatcatgagaataaaaataggaccccacttcttagggctgctgtgaagaggaaagaagctaatatatgtaaattatttattatgatgtctattcacatcatgcattaaagaaaacaggagcaaaatgatggaagatgcctgggtccttgatgatatcatcaagtcactgaactcgtccaaatacagcctcatttgcacttttagtcatgtgagataacatacttactctgagtcattacaatttgggcttttaaaaaattgctgatcaaattgcactccctagcctaaggaaaacatttaaaattcagatgaagatgtattgataatgggaaaaaagtaaaaaacatcctaattatgtagaaataaaggtaggattaaacaaactatgtagggtaaaatattatgtaaccatcaaaaagtgatgtcagaaaattgtttcatagcataggaaaatgctttcactctaatggtgattcctgaaatatgcaaaaatgtaattataaaaggttggaagaaaataaccccaaatatgtatagtaggctagatttgagtattttaattaaatgccttaatattttttgtatttaaaatgactatcatatattattttataatgggttaaacagtaggtttctaacctttatttatgacatacacaaatattagaaacaaaactatatatttgtatgagatcatctacatacaatgcatttaaaattgaaaaaaataatgtgttaagagtaattaccactgagatgtgagattttgaatgacatttctcctacctttttatatacacgtgcacacatattacacattttctacaatgagcacatgctgctttaaaatctgaaacaaatccaattcttaaaaataccaatttataacttttacatccaatatcattgcttcaaaccctatgtctggtacttaaatcaatccaatagattttcattgagtgtgtaatatgtacctaatactgtgtgataataatcagtaccctttattagacactgtgatcgtaattttgtatatattatctgtaatattttcagtaaagtattgaatatacatatcacaatagaccagattcaaatcctggtctattgtatctacttggttgcttgctctcctccagctgtagttaaaaaaaaaatcatataaatcaatgcagtgtataaaccctgtcaaaaaataaaaaatctcaaagaaggatgaagtgctttcagcctggtaagatccagggaaatttcaacaacaaggtggcaatgtgcagaaccttcaagcagggttgaacaaggaagaggccagcttcctgaatgaggggagtgttgtgggtggtggcttggacgggagaatgtgtcattcaatgctggggattgcaaactagaccatgttggttggggtaaataagtatattaagaggaaggatcaagaatagaaactatagattaagatgatagagagctctgaatgtgaggctttggaatttaaatttcatttgctgggcaatggggttccatggtacattctttgggccacagagggtggggatgggttttggagcacattgctttgatgagtatttaggcaggaccacaggagtgaattagagaaaggaacctgggctaagcctgccaacatccatttcttcttttggggaaacaaagggacagaagttttaaaaactgtccagagttaacaaccaagaatgagacaggttggaaccccaggctatctgacactgttgcctacccagcatctgtggaggtgggatgcagcagcggtcaatgcaaggccaggcaaaaccgtgccccagccctgagatggggaggagtgtgttgtgtgcagcagaatgtggaaagttctcaggagtgtggtatctgtgacccaatcacccatcagcatgtgtgggagcagtcaaactgggccacacatgatcctgtagatttaggaccctccctgtttttgctcactgctccatggcagccaatatgcctaaagctgggagcaagctcccaatcccacctggggcatcccgggaggcttattacattgaagcagcaagcagagctccaaggagcaaaacgtctctgttaaagcaaaacatcattaagatgagaagaggcagtgtcttcaacacccacacagtgccactggggctgtaaaatgtgcctcaaaattagacatgggaaagagcttcaccagtgctgactgttcatccccaaggacaagggtagcctgattccctctgacttcacccccagctctgccacgaagctgtgagtgttttgtctgagtctatttgagatgtcttatgcaacagaacctcatttctgagaggaaatggtttgctttctttcacacaacattcacattgtcaggaaagtttccctgacatgcagcccggtttgcgcctttcttgcttataagaagaaccttgaagtctccaaggggatatgttccttaagaagatgttcaaaaccctaaatagactgaaatgttcttctgtggggaagagtattacactgagtactaattcattgtgctgcatttgagaggcaggatacaaggtgtaaagttcttatacttgctttattacactgatttcttgcttgcatcaaaggtaggtaggtaggatgtaggtcaggggttatttttgccattttacagataaggaaatgaaagcttagagatattgatgacttgaccaataagtcacactgaaattaagcagtagaaatgggtccatttactccaaatccaaggtctttctaataccacactctagccatcactgttctgggcaccatggaagtatggccaatgaagggtcacctgtcccatatgtgttcatcattaagttactgtctttccattttaaatccacccttctctgtgcagctttgtcttactggtgctgccaatcctattttcttgccatctgggttaacattaggttgtgctaatagggggcactagaggaaggttgcaaggatggagaaaaaaaggacttccagcttgcttcctggtggcttcctgcctgcttctgttcctggaagcttcaccccagtggtgctgcttcatcttggcaggggtagttccttcctaaagcagcagctgaactcagtatgtttttttcaacacttgcagaaccagtggtatgcattccaccacccaccaccaaaataccagcaccagctggcaggcaccttcttctcagtggtctgaagccagccccacgggacccctcctatgttgagctcagagacaccagcactagccaatcagcatctccctctcagaggtctgagctccagcccaacagggcccctcctccaacgtcctgcattttaataatcccaactgcttatgttttttcctccagcccaagggacagtggatgctttctgtagtagctactacttctgtaaaaccttagtgtcctcttttactttttcagatacctggttaatgaatttacacctagttaaaatttttgtattatgttctctccattcaaatgcctgggatagttcctatctcttgagtggccattgactgatagacaagctgagggcccatcattagactattataattaatataatataatgagtgatggactcatgaaacaaggtagagacaagtcagaggtagagtgcctgacacatagtagggctcaagaaatagctaatgaattgaaaaaaatgaatcactgaataaaggaaagtcttagtgttgaaggaatgcttgggcagtgatccaagcaggagagtcaataggagcgggagcgctgggaaagcgctcttgaagaagagtttccaccattcagagaatgagggttcaaagtctgaagtgggttgtatctcaagaattgacctgagagaggctgtagcaaggcgaggctagggttgtggcacaagtctaagttctttcatatttgtgagggagtgaaaaactcaaccaaagggagtcgggtagccctggctgccccttcagtcaggaaggtgtcacggaagctctgaacccaatgtctctctccacatctactttccaacctccatctctgctttccaagctgcacccctgagaaggagtaagaaccagctggggaaaagccaactcaggagcctacctacctcttactaatccttcaatatcagcttaaaactcacgtcaccagggagacatttctcagccccagaggaggctggtcccccactgtcagaaccccatagcagtttctcctcctaacagtcagcacacttgcagccatgtgttcaatgcctgcccctaccccagaatgcaagcccatgaacaagtccagttctgtgggtctgccaaataccgtctgagattctcaagtactgacatcatggcagatcttgacctggtccccagctagatgagcctgctccttttggttctgatggcatatgcctcactcatcctacagctcctgagagctgggacagttgcctacctctgcaagtagcgaggcttctgtagagaggcaggggatagctgctctgtggccacctggccatgggcctggcagctgctgccctgactgctcacctggctctgacaatcagaataatggggatttattgtcccttctctctgctaatcctagagatgagggatgagcatctggaaaagctcgtttggggttggtaatgacctccaggagggaattctcacacaacttctaccatgcccccactcatacacctacctgtccctacatatccaaagctctgaattcgactctgacccagatgctacaactatcttctttaatccaggtgcatttctgtccaggcaacctcaagcacaaaggcgtagaagagaagagaagcaacatgcccttggagtccacagaatatggaaactagcctgactggagttgaaggtctcttgaggatttatgtagtaggtacttgctgtattagtctgttctcacactgttataaggacatatctgaaactgggtaatttataaagataagaggtttaatgcactcacagttccacatggctggggaggcctcacaatcatgatagaaggcaaaggagtaacaaaggcatatcatacatggcagcaggcaagagagtgtgtgcaggggaactgccccttataaaaccatcagatctaatgagacttattctctatcatgagaatagcatgggaaaatccaccaccatgattcaattacctcccaccagttctctcccatgacacgtggggattatgggagctacaattcaagatgagatttgggtggggacacacccaaacatattattccactcctggcccctcccaaatctcacgtcctcacatttcaaaaccaatcatgccttcccaacagtcccccaaagtcttaacttatttcagcattaactcagaagtccacagtccaaagtctcatctaagacaaggcaagtcccttctgcctatgagcctataaaatcaaaagcaagttagttacttcctagatacaataggggtaaaggcattgggtaaatacactcattccgaaagggagaaattggcctaaacaaaaggggctacaggccccatgcaagtccaaaatctaatagggtagtcattaaaccttaaagttccaaaatgatctactttgactccatgtctcacatccaggttatgctgttgcaagaagtgagctcccacagccttgggcagctccatcactgtggctttgcaggtacagctatcctcctggctgctttaatggctggcattgagtgtctgtggcttttccaggtgcacgatgcaagctgtaagtggatcgaccattctggaggggtctggggtctggaggatcgtggtcctcttctcacagctccactaggcagtgccccattggaaactttgtgtggggggtctaacctcacacttcccttctgcactgcctgagcagaggttctccatgagggctctgtccctgcagcacacctctgcctggacatctaggcatttccatacatctaggaggaggttcccaaatctcaattcttgtcttctgtgcacccacaggaccaacaccacatggaagctgtcaaggcttggggcttgtaccctctgaagcaatggcctgagctgtaccttggctccttttaaccatggctggagctgaagcagctggtatgcagggcaccatgtccagaggctgcacactgaagggggggtcttggacccagcccatgaaagcatttttcctcctagacctcccagcctgtgatgggagtggctgccacaaacgtctctgatacaccctggagacattttccctgttgtcttggtgattaacatttggctcctcattacttatgcaaatttctgcagctggcttgaatttctccccagaagatgggtttttcttttctactgcatggtcaggctgcaaattttccaaacttttatactctgtcacctctccagtgctttgctgcttagaaatttcttccaccaggtaccctaaatcatctctctcaagtttaaaattccacagatctctagggcagggacaaaatgccaccagtctctttgcaaaaagcataacaagagtgaccttggctccagttcctaagttcctcatctccatctgagaccacctcagcctggactttattgtccataacgctatcagtattttggtcaaagccattcaacaagactctaggaagttccaaactttcccacattttcatgtcttctgagccctccaagtctctaggaagctccaaactttcccacattttcctatcttcttcagagccctccaaactgtttcaacctctgcctgttactcagttccaaagttgcctccacatctgtgggtatctttacagtagcaccctactcctggtaccaatttacagtattaatcagggttctctagaggaacagaactaataggatagatgtatatatgaaggagagtttattaaggagcattgactcagacaatcacaaggtgaagtcccacaataggctatctgcaagctgaggatcaaggaagccagtctgagttccaaaatctcaaaagtagggaagctaacagtacagccttcagtctgttgccaaaggcctgagagcccctggctgaccactggtgtaagtccaagagtccaaaagctgaagaactttgagtctgatgttcaagggcaggaagcatccagcatgggagaaagataaaggctggaagactcagcaaggcaagtccttccagcttcttcctgccttattctagccatgctggcagctgactagatggcgcccactcagattgaaggttggtctgcctctcccagtccactgactcaaatgttaatctcctttggcaacaccttgacacacatacccaggaacaatactttgcatccttcaatccgatcaagttgacactcaatattaaccatcatgcctgctgttcttgcatatggtgttccagcactcattcctcaattttctagtgatagagcccaatgtctcctttttgtggcccactgctcttctactcttagtccatggactttgtctatgctaatcacactgcctaggtccagtgatgagtgtgtgatccagcctgacccatcagcatagttcaacctagctccagttgttggtttaggaatgagcatctgacaccagtgggataaattcaatcaatgacaaggctcttaatgtaattattagggaagtgtcactgtctttctcgtgtggaaactgctgcagtgaagtgctagcccgcagctgccagcagcaacctctgtcttctcatgagcagagcctgagaatgaagccaacacagaggataccagacccaagagatggagagggacatttgagcccctaaatctagatctgcctggatgcttcaatctttgcaccaatacatttcctttctctcaaaccactttgagttgtgttttcattgccagagatggaaagaatcctgactaatgtacatacagaggtgaatgagttccatgcctaaatgcttgactggagattgatcctggaccattacactcatggagaactgtgagctctgttaaaactcttcaaaagtttcctgttgctgtcaggatataacctcaactccttaaccatggttttagagccttcaatgatcaggaccttgctgatctctggcctcatcctgaagcacttttcctcccaatttatattctggccacactggattttcagtttctagaatgtaccattgtctcctgcttctggaatttgtcctcttccttgagcatgcttcacctacctaagtcctacgattccttcaatatcagcttaaaactcaccccatcactgccagggctccacagcagttccaccttctaacactcagcacacttgcagccaggcgttcaatgcctgcccctatcccagaatataaggccccgcgagagtcagatccgtgctgctctaatctccacgctatcactaggacatgaatagagacccaacaaataaatatttgttgaatacctgaatgagataaataatgcaggcaaccctaagtacgtggaagtggaggagatctaaattagggctgagatctgtgggtcagccagctaggcatgagatgatcaacgcccaggccaaggtggtaactttagtaagagaaaggcacagggaagggaaaggaaggaaaatctatgtggaaactgagaacagaagaaccaaaataatttgaccggctttgaccaaagctagaaaaagaatctttaaagagacacccaagcccatgaaccaagtgcataagaggaatgtgcagctattggcaggggcagggtcactgcttcaggacacagttatgctgcttatgtaggacaaagcctcagcattttgcaggacccagcagggataacaggggcagaagataggcccttaacaggtggatcctgaacaggtccatcacagttggtggttggaggctagaatagagcagagagcttagcccgagcttatgtccctgggaattgagagagtatcatgggaaattctgccctccaactccacctggctgaagctgagctgcatagtaatgggtgctcctcaaacaaggtgcctgcatcgtcctcacaggggcagccaaagaggtgtttactgtttggattttctctccagagcagacttgctgttctgggaagatcacggagtgatttgcataattgccttctcaggtgatgattgctcagaccaaggaagaatttcaaaaagcccacctgcttgccttgctgggtagcataagggacatatttgggagggaaaaaaaagtcaaccaaagggagtcaggtagccctggctgccccttcaggcaggaaggtgtcaaggaagctcagaacccaacattgctctccacagttgctttccaacctccatctccactttccaaactgtagccctgggaagaagtaagaacaagctggggagaagccaactcaggaagctacctaacacctacaaatccttcaatatcagcgtaaaactcacatcaccaaggaggaattcctcggttccagatgaggccggcctttcattctgaggacctcacggcagttccttcttctaacactccgcacacttgccgccatgtgttcaatgccttctcccaccccagaatgcaagcccatgaacaagtccagttctgtgggcctgccaaacaccaactgagattctaccatttgctagtgaaagagaccaagggccccacagtcaaatgaggatggaggcacagaaataaaacatgggaaaataagtagtagtaaacatagggttctttggaacatggaggaggagctttgaggccagctgaggcaggggtgtgtatcaacaaagccctcctgggggaggtgacatcggaatagagtcttgaaagagtatagtgcctggtacatagtagatgctctaatacccaaggatgaatgacccaatggcaggatggatggggaggcagatgttccaggaaaagaaaaagctggctcagtccgttcttcatcccagagccacagtgaattctgaagctattctaatgccttgtaaactgcacaacattttccatggtgtgtagaatgtgggatgtctcttctgttatcatttcgggtcaggaatgaagtgctcatgttcgcttgtactgggggctactgagtcagaataaccaaggctcagctgactccacctcaaatcaacaggatgctctttaagtatgtgagagattcaccgggccactgcctgcactgtctagttttcttcgaagtgcctatgaaaaatgtgcttaatattcatgctccattccaaagaggcacagatgggggccaaagaggaaaaaaccatttttagtaaaaaatgactagtgtcatgtctcccagcccaaactaatatatttcttgaggctgaccttaagctacctcctacaggaagccttcctcaacaactacagattctgcatcccccttccttcctaagttcttttcacttcactccttgccacatctctacttggggtgtcagctattttgttgttcactgaatgtgtgcacatcttgtggtctctccacctcccaggttcccggaaacatatgtaagaggagctcagttttaaggataagaacattgagatctagagaggtgtacagcacccacttgccccagggttgcacagctcataactgcaggagtcaggcttccaacctggactggtgcccagactctgctcccaactacacttctaccaaccctcttcccatctcgcagcctccccatctcatttctagtccactgctctctacgttgcatcgctgttttctgggtgcatcaggtcccattgtcttgcctcctgaagaatagggtgagtggcttaggagcacagaaccaagtattcacattttcgtttctgccccatgctatttccccatttctggacgcagagtaggtgctgataatatgaagcacagagagaaaaatgtcagcacaaaaaggaagcatctgttcttgagctttcattactcagatgagaaaactgaagctcagagaggggaagtaacttaaatatgcattggacagaaccgagaagaaagcaggctggctcctgccactgtacttcacacataacaggtgcttaaattatgttattgttatattatatattatgtatattccatataatatataataatatgcataatatatatcaccatcattgtcataattttattgttgtctgaatgagacctttaaactcagtatgtcttgtcagtggggagttcggagagttttcacaaacatgagtctttagttcatggagcaaatcagaaggactgaggtgactgactttcaggaaaacaaaggccaacagaaagatgagaagacattcttacatttgtaaagtattttacagctgacaactttcttaaaagaaagattgctaaatttggcattaggaaatctgggactgagaccctttctgccactggatgaccttgacaaagtcatttgttttctttgagcttcagtctcctttgtaagatagaactgtgggatgcactcagaaaagaaaattatggagcatacagggcccaactccccattgctgtgctcatggcagccatcactaattggttaccacactctttgtgctatgcccaggtgaggcttcagaatctgtccctggaaaccactacccattggctggcatgaacgtgttagatgaaaccaatttgtcagtttcagtagatgcctgtacagccaactccagcttcgactttctgactccacgagtctatcacacatacagcaacctgaccaggttagcagagcagggctcacccctctcccccagaggaacaatctgagctcagaccagctcaagtttagatagttggtgaatggtgatggaatcagacactagacctctctaaattggcctggcaagaacactcagtagtcttacatattccctggctacaaaggactcccagtccctcagagtcaaggaccatggtaaaatgaggaaataaccaaaagcttcattctccctttcacaccacaaggtggctgagtgagaacctcccttctggacaggtgataccacgctgcaaaaccaggaagtaggtgaacttgctgatttctttcactttcatccttgtgtcattagaagcccagttcctcttgacagtatctcccaaccaccaccccctctgctgctacaccccatctggccacatatccctcagattgttgccagaactttcttatttcatttgaaagggaagtttgttgataatagcttagagtgagacctcactccattgaaggcagccgcctgcggtggtgggaagagaactgaggctggagtcagaacataggcttcttgtcctgctgctgtggccttggggaaagttgctgttcttctcttgacctcagtttcgcttccagcctatgatttccaagagagaaatgttgaattcttggctaacaggacaaagtgctcacggacctcatccctacactggtggctgggtgagtgttaggggaacagggagttccaagagcctctgaatcccactttccatactccttttaaaatccatttagtggccaacattctatggggccgtgaaaaatgagaaagaggaaaggaagggagacggctcttattgaatgcctatcatatgtcaaacatgtccatgtactagctaatgggaaaagtgctgatattccactttatagatgagcaaatcaaggttcagaggggttaagcgacttgcctcagatcaaacagctggtaaatggcagagctaggatttatattgaatactgctgattctaaagctcctgccctttatattccactgtggattttttttctttttctaattacatagtatgaagcatggagaataaacatgaagccacaccttgcagggttcccagcctatcaaaaaggtaagccagcctcctgaataattgtaatataaagccaagcatgaaaggatgggtataatccaagagtcacagatgagaacagacttcatgaggaagtggcatcttttcaggttgttccggcctcccatacaacaatgacaacaataagcaatgagagtaatgatgaacacttatctgtactagctcccttgctcgtgaaataggtactctttttctttccattttaaagaggaggaaagcaagacacagagaggccaagtaacatatcatagatcacaaggcttggaagtgacggagcctggatcaattcccaggcagattggctccagcatgcacactcttgatgaacctcactctgctgcttcttgtagtattttctcaccttgaccaccacctggggaagtagcaggagatctggggaatcctgtgagagcatttaggctaccttcctttcatgccagggaagggactagcccaaggggagcagtggcttggaggaatagagctcagctcctctcctcccagctcagaccacttgcctatgctctcctcctcctctgcaatgctggaaagatgccagcctgccaaggccttcactatgcaggctctgcatagagaagaagaacccaagcccctgtacatgggctattgttcaaggcattttagtaacatgaagatagcaaattacccacaatgaacaattctgtagaacaaggtgttccctggtctccatctgagtacctgtgcggatggtattgttagcaggtatacaggagaggagccaagctttgtgaaagggagctcttttgggtgatttgtcctgcctgtcttgcttttgctaaataatgaggatagcatgggctttggaaggaggcaggcgtgagttggaattccaccatgtcattctgtagctgtgtgaccttgggtaaattacctaacgtctctgagcatcccatccaaaaatggaaatatcactattccatggagaatcctatgaggattaaaaggagataatgtatgtaaagtagcttatataataccacattcattctgaaaacaaacatatccgaaccgccataaaaactggtaacatcatagaatgtaactcactaaaaagatccaagaatcaggaattaaagcaagaagaggattacactgtgttgttcactaaccacacacctgatagtatgagaagtagttctcactttaccctttcatcaacactgtgggtcggatgacactgtacccattttacagatgaagagattaaggatcatagagggtcaagatcttctgcaggaatgctgcttctttgactccttctgttctcagatcagttcaaagctctcagcttcacttgctaattttatacagagttgatttccggctctgttttatccttagcttccgcaatctggaaatgtgctttgcactgataattttatctattctggtacatcagtcgtttccatacaggtctccatgaccccccgcacccaccccagtcttcctcctagcccaaatgtgggccctgctcccctgtttctagtgtcctgttttatatccatccacagtggtcccagtgacacctcacactctatgtcgccaaaagcaactcgctccaccccaactctccttttcctggttctctgagtttacgcatagcacctctcttcagtgacccaggaaggatttctttggtgtctctatttatttatttacttttcccacaatactcatattcaggcagtaccctctcttcagcacccaccccccaaccaccattccctattacccacctaatgttctgattagaattctttttttctgagagagagagagggtcttgcactgtggtctaggctggagtacagtggtacagtctcagctcactgcagcctgaacctcccaggctaaagcaatctttccacctcagcctcccaagtagctagaactataggcatgcactaccatgcatggctaacttttgtattttttgaaagacgtggtttctccacatagcccagactaatcttgaactccgaaactcaagcaatccacccccctcagcctcccaaagtgccaggattacaggtataagccatcacgcctggcctgattcgaattcttaaacacaactttgaaggtggctcaaaagtcttcagttacaccccactgttaccttataaagtcctaactatagcttgccattggagacaccatgaaattccatcttaatctatttctccctctaatatacgccatagcaaaatgggtaacactgctctcgacagtatatctgatgctcaattagtagtagtaataaaggctgccagtgtcagaagcacttgacatgcagtgtctcattaattcctcaccacacccctgtgagtagacaagatgtgacaagatgtgtagttgcacagggccctgtgctcagaaggctgtgctcccatgcctggtttaatgctctgctctcactgtgtggaaattgttaaagctttttcaactcggggcctcacattgtcattctgttcagggccctgcaaactatgtagccagtcctggaagcagctgctattattacccccattttacagatgtgaaaaccaaggccacacaactaatgagcccaagactcttgtcaatacccgtattgtgccaagggtggcagacccacactctgggcttactgtgtgccatctactgtgctccctcccttcctccacatccccatgttgccagagcgagtggcatttcctgtccttgaggttaaatgactttctcacaagtttgcctgacttcaagcccagtgcccttcctgctacactgatccaaataaaacggtgcctgccccccaacccccaattccaaagccaggcctggtgtctggcgagacctgaacagggggcagaatctctgcggagacctctaaaaataaagcccgcctgcaactgtgttctgagacctgaagcttccttcttcctcttaaaagctgttcccatctctgaaagcagcttctcaccatgggctgtggctgctgcttttcccgcactgcaagggagaaacggaacagattgcaggagcaattaaaccatcacatggaaagcccagagagattggggagaggggaggagatgctgtttcttaatggcctgcctctatatttagcctgaaatacctcaatctctgacccttccagggagcaggtagaggtgagagtgaagttgggggcttcagctccgttgggcttctgggtcaggaagcgcccatctgccagtgtgcggccccattaccgccatgccttacagggactcaccatatggcaggacaggaaaccccaatcatcaaacaagcagtgaaaccacagcacagcctgtctaggtggaatttggcaagatgactcagcaaagatgtcaagtcaacaacagggagctggcctgccccacaggatgccaacttccccaaggggacagggggcttgtgacaggtggtgaagggtggtcagcctttagtttcagccccagttacagaagagcctccattcctctcccttgctgcatcctgagtcagacaatgtgtgtggggcggatggcagtgagttttaaaaaaacacagaggcccgggcccagtgctaaagacagtaattgattctggagtggggttcagacgtctgtatttgcataagactctccaggtaattacaagcatggcccgttgagaaacaaccagtagtaagattaggcataagatgcatttgactttatattctagttttggtccctcgcttcttgggggactttgaagaagtgtatgtttatctcagagcctcagtttccccttctctatatgagtatgaaattctcaatttctggtacatagccaatgctcagtaaatgttgtgggctgacaaaatgaatgaatgaatggaggatgtaagcaaatgagtaaacacataacctagcacagacgatgttggttcctgcaggcacaaggatatggctgcttctcttgggctgggctgtctcacaagcaggctcagtcacaaggaatgaagtagtctatctgcaaggtggtcccaagtgacatcagcagaggatctggggaacaagaaaggggaaggcaggaagcaatgcagggtgcattaatgagcccattactattgtggacaattgaggctccgtcccactggggtctctgggcgacaatgtgaacatgctgcagagttgtctcacccgagggacgggagctgtacctattctccagctcccatcatcaatgacagagggccattcctgggggcaggaactccagggcacttctgctctgtcctgcttgtgggctgagaaaaagccctggggcagagaagtggagagtcccaggtgcttgttgtagaatgtcatcggcagctactgccatggtgagtgccaaggggatacaggtgaggcaccaacagcacctgcctcgctaggcctccgatatgtaactttccactctgggctaggggtctgggggaagagggaaaggaaaggcccactcatggtccaagctgtcttacaccacacagctgccggtaccattaggatctagcaatgcaaagtcttgtttatctcaacgtgcctatttcctcggcagttctgaggctagcagtgtttctcagtctctgaactattgacattttgggctcattaattctttgttgtagggagctgctctgtggattgtaggatgctaagcagcgtccctggcctctacccactagatgccagtagcacctttcattatgacaacaaaacttgtttccagacattatcaaatgtcccctgggtggcaaagttgcccccaggtgagaaccagtggggtagttggatacctttcctcattctcgaagcccaggcagcaccccacttaaacttctggagctgtggatgcatcttgaccaggccacgctctccttggtctctgcctagtgggatgctgcacttggaacacatcccagagacaggcagtgcccacacccagctgtgaaacacactgctcccctgctgagccaagccctgatctatgggcagaggaagttaagcagcagccgtggcatcacagttggactatgggaaccgcaaaagacagggaagttaggcagctttggctccagcggcctccactccaacctgggtcccagaggccaaggaggaggatttatcagaccagcccctaacacagacccagggagatttaaggctaactcaacaaggagtttttgtgaagagttgtaagcactcattgaggctatgcaattatcctaagaaatgcggtgagcacacgcagagccagcagggaaaggtgtccaggctgactccaaactacttgctttcatcattaaccctggtggcatctggtgaaaggtgggggtgaagtgggggctgagaaatcttcccccaacaggcaaggggagatgctcagaacaaacccaggtgtctgagtcactcgtgctgacagcagattcatcgcccttcagtcctgcaaaagaggtagccagcctgcctttgctatacctatcatccatcaaatctgagaagccaaacttgggcgtaacagggttgcatttctcctctgggctgcttcctccactcccatttctttatgcttccctccaggatgcgtgtgcaatgcgcacaccactcaaagggcacacagtggcacgcagtcctccagcagaaatgattcacagccaaatacagaagccggctgagcacagaatccaaagacagtggggctccaagccggctgtgctagcggcacaccagctctcctgccttcgtttcctgggttgtcagtgcagtagcctacctggtcaaaacacgataaaacaccaagcagaagcagagaaacctctgttctctggcctggcccctgctgcaaccttcagaaggcttgagagaatatttggcacctggagaagagcaacggcaagtctaaaggcaaccaggagaacatttcacacatatgcacacacacaaatgcatacacaaacatacgctcacacaccagctcctgaaagtgacagtttgtgaatccctgtccctgccctcccattcatgcataatgaacattcctctgaagagaagagaggtggggaagaagcaagggatgacttttgctggaatgaactctttggaaatgcaagattgtgtcaggacatgcccatatacatgtaaggacacacaaacacagaattagaacattttctacctacgaatctacctatttcatctgtatttgtgaaaaaaaaattataacccaaaaagattaagaggctttgataagattatacagagctgggactcaaacttggatcttcagacccagaccttgtgatggatttagaacaatctgcatccatgatttaattgggagagggacaagggattgaaattcttggcctgtcttcctgtaaatagaagctgtgattctgttgacattagtaataattcttccccgagactgagaaaaacaacagaagtaataataataaccaccaggctcagcgttcttacagttactaagtgctttcccatttgtaacctcaggcgattttcccaacaatgcgggatgggggattaatggtatcaccacctcctccttacagataaagaaacaaagtcttcaaaggttgaataatgttgggaacaactataaactatagactaataaatgttaagttaatattatcaatgtcatcaacattatacaccttacttaccaaacatgtcacatgatgtcttaaggatggagagtcatgccttgtccatgtatgaatcccccaaaggtcccaaaagagaacttgatgtacagtaggtgaccaatatacatttgacgattgatttagttactgaatgcatgacaggaaggacgatagaaaaatactcacatccagtctctctgtgggctctaaactctaaaagagtagtttctgtttctttaaaaacaaaacaaacaaaggtcagtattgcccagagctccagtgatctctaggcttagattaatggtccgctagttctttgcgtaggactggtccagctatgtggtttctgactatacagcatgctttaaggagcatcaagaagcattctctgtttggaaaaacaaaacaaaacaaaaaaatccaaaaatcctttattgcttgaaatttgcaccttccactccctcaagctaaggtgtgaaaagctcaattagttgtctgtgatcacacatcacgccttactaaggattagtttataagactagctcctgccacatggctaatcctcaaaaagagaacacagaacaggtcacttttgatgaagaataagcgtgttaacacaagctttaggtctcataacacactgtggggacttgggccccgtcgcagacaatgaaagagtcccagccagccagcactggagaaaaggagactgcaaatgcagacaaaccttgccaagcttcctccctctctgggtcacagtttccttctgtgcaaatcagagactgagactgaaagagggatgtgctgacagaactaacccaggtcaggtggtcagcaccagagttatgcctagggccagccctgaatgtggcacacccacagtgagggaatctctacccaaagaggggatgatctgaatctctgcatcatctcttgggcttggctgctagagtttctgggctggaagcaggagcagaaaccttctccacagagactgaggtggaacacacagagctcagctctgagttgtagtccaaatcccagaagctaccaaagggccaagggttattcagctgaagggatcagaagcagatgctaggagccaaggatttaggatctagggagagcagccagcacaacccagtggagacatcaacagaggggctgtggttcctagcttcccattcaggtgcaggcggaggcaagctgccattgttgggggcgggtggagaggatagaagctgtgcttaaagagccctggcagaatggccaaaccatgcttcctcctgtagcaataggcccagacttgggcaattgagtgcttttctcactgcccagcagggcagggatgcaaattccagagtgaagattgggtaggcaggagcgctctaactttcaattacagtgtcacaccaaatggaactccgcagctctctctctactctggggtgtatttgactttgaatcaagcgacctcctgaacatatagacacagagaggagtggcttgttcctgctcactcaccccaccaggctgccatgggacataagccacagcccatcgtttacacacaggcttattaaagcaaataggatttggcctagattgcaaacaggttctcctctgggtaagcgtatttgctgtgatccttggggtgtttcctgtggagcacaggacacccaaacagggcctgcttggttgccctgggcctcagggatgccttgccagtcccactccccttaccccaggagagctcgaaacatttgcttaagacatctccatgcatcatcctcccacctggtccaggggaaggaaagttctgattttccaccttctactctgtcctccaaaatttcctgcctttttccgtccactaatccccattcactcagtcttcttcccggcttcagtttcttcagctgggaaatgggacgattctgtgagatgctttcttaggttttttttttctcctcaaacctcctgtgctctctggaagctctgggaagtggaaagcagtctggcttgcaagtcaggagccctgcagtctattaccaaacttcccctttcctgaataggtgaccatgagtaattccctcccaattcccaagtctcagtgtcttcagctacaacgttaaggaagcagatttaaagatctctgagctcacttctctttggtgtcttactccagcagccattgtgcttatgtgtgtgtatgtatgtgtgtacaacctcagctggctttgcctgcctggcaccccagccctatccctggatttttccttgggcagtcaccctccatctggcggcatgcagtctcagtggtggtatccatcaaggtatgctgcccggcaggtggacaggagacttaggcaagtccagccagcttctcttttcctagacactgacctgaattgagtgctgttaggtgataggaacctatctatccatccatccatccatccatccatccatccatccatccatagagccctgccacaaagacagtgcccatgaattcctccatcctagatactcagaggttcctgattcctctcttttgtgaggccacacctattttagccttagttctgattttgtggattgcccagtatccatccattcacatctgtgtctaagtcctacaagtctactcgaatgtcatcttttaaatgatgccttccctggtttccctatataaacttgcagccccaccctcatccctcagcttttcctgtcttcctctcctgcttcaattttctccatagtactttatcatgttttaacaattgtatcatctaatttacttatttatgtggtgtgttggccatctctccccactagaatgtaagttccctgaggccagacatttgtgtctgctttattcattggtatattgccagtgctcaggatagtgtctgacacgtggcaggcactcactaaatatttgttgaatgaatgaatgtatgaaatcatgcttgaaagttgacctcagttggttttggccactaatcctaattgagaccgtctcctgttcttccctgtggatcctttctccctccccaggatggaagcccctttgctgatatgggatggcaaagcctgaacagaagcagggatcagagcccaaataaagggttgggcctcctgaggtggaggcccagtctagtcctcttccaggggaagatggctcaatcttcgccctctatcttcctctctccccctttcaaccccttgtcctagacccacctctgcaatctgaaccactttcatttaaggaaacccaaagtcatgatctgttttctaggaaagtcagagccaaagacatgaacagaaaagaaaaaaaatgctgacaagtctcagtgggccaggacctgaaaatcaatttgacacatcaattttttggatttaataactcatgctcccatggaatcaaggtcataaatagtaaagagagttccaggcaagcctaccaaaatctgtttgactcggctggagaccttgatctcatctctctgttctggtcccatcaataatttcctctcctagatgcttcctctctttggtttggctcccacatcattgccctgtcaatgatgtttgcctacatttctgtctcttccttctgtgcacctcacctcttctttccctgttcattgaatgaagtcatcccacaaggctctgttctttgctgtctgggcttctcagcctacatttaatcctcaggaatgtaagtctctccttttacggtaccatgttgaagatttccccaaattcttctcagtacccccaaaatctctaatcactggatggcctcctcaactggaaatctggcttatcctttgcctatcttcagacctcccctttttaaacttctctgccctcaaattggatggacgctcttggatcatctgctcgaatgtcacgttttcaatgaagccttccctggtctccttatatattaataccccatttacagatgatcttggatcatttacagatccaagatcatctgtaaatggggtattaatccctttctcaaataactgttgagtgagtttaacaatatgattcatctaaaggtgctttgaaatggtacgagtgttacttggtctaattcagtctcagacttctggttgtggaatgcctgccctttatttccatagtctcatatagtgagtccagctgtacactcagggacttgtgtccccatctccacaataacctgcccaggcctgaccccacattccaactctggattttcatcgtgcatggactccttgtatgagcccagcctagttttccaactcacctgtgctccaccctcccaattgctctcttccaactggagagcccacgtgggcccaaggaaggcagggaggaaagtgacattgttgagccctgtgcccggtgaagtacgcatgtgagctcatccaatctgcagccactccaggaggagggcatcattatcctcaataaacagatgagcaaacagaggctcatggagggtcagcgacgtgtccaaggtcactgactcatcagaaggctactttgttctcactccatcaggtggcccaaggagaaaggtaagacagaaagaggaagccactaggacaaacttgttcctgctgtgatacccttaaacatcaaatcatgagattaggtcgtcctgggggtgggtgtgggcaggggagggaaaagtggctataccgaagcaaggatggagggaggagggtgcctgtgatcagccatgctaattttgacattttcctgtgcgtctgcttgtcatcatcaacttataatttaacctcgttgtggcgatgcctctggaatgtcaacaaggcttgctggaatttcattacagccaggcagctggcccctggtatttctgatacaaatgatgtgcagctgcattctggccctgctgtctttatcccccatctagcaaatggcagcattaggcacacttaatccggagagatattccctacaccgagaagagggctcgtcaattccaccgggggcatttcctatggactgctctgcctgagccaattaaactaaagtaattgctgaaaagcaatggatattgatgatggatacagggggctgaccacaggggtagttggagggaaagtgctgaataatgaaacctccccatatctgcacagcatttgccactttcagggcacctctgcctgcatcgtggcagtggttcagtgatctgtgctgggaggttgtggcattcccattttgcaaaagtgaacatcaaagctcagaggaaaaaatgatttcaagttaaccagaattaggaaacagaaatctgggtacacaaagtgcacgtctagatttcacatttatccaacaaatatttattgagcacctactgttagccaggccttgtgcttgtttgaaggatacagtttttctatcctcgataaccatggcatttttctgtaggattttcctttcaggccctctcctaagagagatctttcccaatcccctacatcctataccgtttactttccccttccctctggccccaaagagaaggttttgatgtctgtcgattctacctgagtatacgtaggtttccttttctgtccctcccaacagaagcctcatgacactgattgttcccagggacagagaaggcctgccctgttacaggactcctgcaccctgtgagcagactggagaggaatttggggccagcggtcttgttggccctgaaagcacggtgtctgcagctgcctgcctggcacatgggttcaagcagccttgccagctcatggcatcatggtgcagtatggaggtcccgggccatggtttcagtgctgtctatgactcatgggctgtggagtcctggtgccagcccttgaaggtggggcaggaaagtgaggcacatgagtgaattcatagctgagaccacgccagacctggatctttcccaggtttgaaggttgaatgtgcctgtgctggccagggcttggtgagcttctccactggatggtaaaccccactcagtgtcttccctattatcacactcaggccctagctgctagaagcctcatttgcctaagtttttgtcccaatgtttccgtgaaggcagagagaggagctatttgcatgccagcccagggctacgtagaaaatatggcagggatcctctcacactgcagtcgagtcaaggcagtccagggtggctgctggggccagactgccccgtcaagatccagcctgcctttcactgactgtgtgattagaatgtcttgccctatccctggactttagtttctgcaacttcaaaatgaggacaagataacctccaaggtccaggttactttcctatacagagtctggaactgtgcctgcccgcatagtgcacactcacagccagctaaaggatggtgtgcctggggtgggtctgcagggcaagccctatttcatagtttaacatttctgacaccacctgtgtcaaattcctatgcttacggtgtgctgggagagtcgagtcaaggccagactgagggtgactctggccctctgtgctaggcctactgtctgcagatgcctccaaccctgccttggacagagggaggagtaaggagtgttaggaagggcctggggtgtcaaagagcttctaaccccaccagtgagtcctggtgcctatggagggagagcgaggagggcttctaaacatgggtcatagataaaaccaaaacagaataaacacacttggggggcttacaggagaaacattatcacaaaagggctgagtgtaagtacagaaggggacaggacaggcttattgtgtctcctcggtgacagatccaaccagagtcagtttacagactacatgtaaggtgtcgggcagtcaacccccagctggttccagggccttggtccctcccagcagctgtcttccccaagtctatgactcatgaccaggagagaggagggtgggcagtgagttgcatgaaggcaagacaccctctaaagcctggacccaggccatgacaccaatccatcagagccgtgaccttggcctggcgttgtcttgggggcacaagagtgaccattcacactacctgcctctatccgtccttccttcctgcatgagacctggtatagctgctgctccatgcctaccactgggtcatagagattcagagtctccctggggcagttgccagggagtgaggccgtcagaaaccctgacttctcccctccacccagccgagctccaccaagcccaggagtggctctcccggagcctggtgtcccctgtatgcacagagtactttaagaaatccagaaaagtcatcacccccaggaatccacactgaatgtgagccagcatcagccctctctgcactcgacctcctcaggtaccaagatgggttatatttggggtaagaggggacagaaaggcctcatgtgtcaggaaaaagttacaaaatcccacccctcatacaagaactctcactttttccccttcttagcattctgcagagctagagtgaaccatgttggccattgtgaaagtacaaattcaggaatgctgaggtcattactcaaggtgacatcacttataagtggccagcccttgacctacaaggtctaaatcacatttctatcttcacacttagaggtctcaatttctgcttacacaccttcaataatgaagaactcgggaactcagtctctcttgaatggaactccacatagaagagtctcaagtggtccaaagtaactagacttctctctgtgccccttaggcctcctctcttctttctctactggacacagcaacagcaagtatccgagtcacttagtattcctggtattctgagctgggctccagctggggtgagccttgtagattctcagacagcagcatcaaggaatgtgggcttcaagccaagtcagataataggaaaataataataataataaagatagagacacaaacacaaggacactgggacaagcataagcggttagatccacaaacagagacaaataggtgctgggagcatggtggaaggacacacctccactgacagccacatattttcaggactcaagagcccaaggacagacagagctcaagcaagtctctgagtgagggaggtgagaagccggatgagggctggcctttgtgtctccatctctaccacttgaccaggatcaaagaacttccccagatgagcttagacacttagacatctagaaatgactcagtgggcgagaagaaagggagactaggaagtgaaagaatgaagtgaaagaagtgaaagaatgggccacaacacatatggagatgggatggcaggggaaaggatgagaatcttgggaatgggaagaagttttctgggaacttgggtaggttgaggcaacaggttgtggtggatgctgtgatgtgcttcccaggtccctcttcaagaaggaaggatttatcctgctacctgctggggatgctgcctgcagaaagttctcagctgccagctccccatggggtttgccctaaccctgactgcagagagctgccttgctccagatcatgccttctttacagggtggttcacatccaatgattgatccatggaaagacattgaggcctgagcccctttccccagtctggaacaactctgaaggctcattccatttcacatttcccatggcatcaggtaagatgctcattgagactgcatcacagctcagcttctccctctgtctaatcctgctttctccccatcccttcctcaagtgtaatttttttttttttagacagaatcttgctctgtcaccaggctggagtgcaatggcacaatctcagctcactgcaacctctgcctcctgggttcaagcaactccactgcctcagcctcccaagtagctgagaccacaggcgtgcacaatctcgcctggctaattttttttctttcattttttttgtattttagtagagacggggtttcaccatgttggccaggatgatctccatctcctgacctagtgatccacctgcctcggcctcccaaagtgctgggattacgggcgtgagccaccgcacccagccctcaagtgtaattttatgagttcttcctaataaaccattgcaagtaaatatctatctcagagtctccttcctggggacccagtctgtgacacaggcttaaactctgagcaggaagttttcattttgcctggcccacagtttacaaaaacattgatgactgcgatctcacttgatcttcacaatgatttggtgaagtgggtggtactgttcttacttaacacacgaggaaactgaggcttgaagttcaatggctgttcgaagaccaaaacagcaaggaattggtggaaccaggacttaaaccctggtcttttgggctctcaaatgtatgttctttcctctcttgcacagtttctaaagaaaagaaagaaggaagggagagagaaaggaagggagggtggaaagggggaaagaggagaagaaagaaggaaggaaggaaggaaagaagggagggggggaagattagctaacatctagcacttattctgagctaagcaccatgcttaacattctacatgcattatcttatttaatcctcacaattttatgacatatgtattatttgtatccctatgttatagatgaggaatttgaggcccagagaattgcaacattatctaaggtcacatagccttgtatgaggaagtggcttgatacaaactcacttccgtctgattccaggccaggcatcttaaccactactatcagggagaattggcaccaaccggaaggttgaggagcctcaagaagcagttgtgggctagagtattggggaatccagagcagctaactaagatgctaagcacctgagtaaatgggaagcttagacagatctgcatccttgttctcctgggagcagactgggcctgctttggggctgagccagttcatgcctggagccattgcttggaaattgcacccagccaatccccagccgtaattaccactaggcttgcagcactgggctgagagctggaaatagctctgtatttatttaccctgcaattacatgctacattaaatgctctgcaagaacatggcgatcaccctgcaattaactggtccctgcttcctgggcaagagaaggctggagacagttactggctggaatcaagtgctccctggtttcttaatgggcctggggtcaccttgtaacttatgctggtgggcctggccagaggctgcagctccaagtgggagcttctttagctcctgaaggagacagattaacatctgagtcagatctgagtccagcgttgctatgggttctgtgacaagatcgtccattagtgggtccttgtccatattgtcttctctagctcctcccaaggcatctagtgtctctctgtattttatttttggagttcctgaattctaccagcctttgcataggtcgtttcctatcatgttgacctggtaaattcctatctacctttgaagattcagctcaactatcatctcctctgggaagcatgctttgaaaggagattgtataggaaagtgaaaatcagacatactcgtgacaaaataccagcttcattacttgatagctatgtgactttgagcaacttacttggcctctctgaacctcaatatatgtgtgtatgtgtacatgggtgtatagaactccctgatatcatatgcttatacacattatgtgtatacatatacaagaactcaaagtcttctagttagggacagattttagcaaggtggaaacagcatggtgcctcacacacagtaggtgtgcaccaaatctttgttgaatcaatgagtcagtgagtaaatcaaccatcaatcaaaagaaaccaattaggagctgtgagtgtgtgtgtacccatgtttatctttgtggctgtccacttaacttgctgcatataaacaagtataccagttactcaaaaacataatatgtgcacatgatggtaattggtctctagttgcctggagatttcagagaacttgttcccaggctgtgtggatagactaagaatgccaggaaaaagcactaagaaaagagttaattatatatttactacctctgtcattttctcctaattatgtcttggcaagcagtgtctcctggatgagtcttaatctcagtgtctttaaaaatataataataaatcaatgtgagatgaaatgctcccaacagccaaaatgcaccagacagtttccaatcagtgagagcaccagtgaacagttctggacccagtttcgatgacgtttgggcctcaggtaccagatatggagccagaaaaacagtcagagagcagagcagtgtctagaacgtgtcactgaggcctcttctcagtcttctgagggtcacctggaatccctatggcctctgcctgctgccaatgtaccatgaggcaacagaggaggaagttaggcgtgcaaattcgtgagccaccctggtgcattttgcttggtttctggactgagaagacagggcccatttactcagccctctgtatgtcagcggctctcaactgggggcagttctatcctcctagcagtcatttgtacaagtctggagttattttcagtggttaccacctggggattttgctactggcatccaatgggtagaggccaggggtgctgctgaacattctacaatgcacaggatactcccacccacagcaaagaattatctggcttaaaatgccagtaatgcccaggttgagaagccctctgtttgtgctggcaagcttgggccctggcagcatgtgtccatgctgtctgttcttgttgtcactagttctggttttcagaccttttcatgctcttttctattttggtttctaacaagggacacaggcacacacatgctcagaacaaatgcacagccttccttccccataacccctttctggctgcaatcatattcactgaggattagtcagccctctccaatggaggggagtggacactcaccttgacatcctgtgggcgcctgcagatgctggctctttctctcctcccagggataagaccgcacttctctcactggtcccagtgggcatagcaaaagcaacaaagctgtggggcttgttggtgcttcatcgaacaggcctaggcaggaggcccagtgcagccctgtctatgaggtgacctgggaatctgtgtttcttatcaagtgtcaacacatatgcccagcaatttcactctgttccataccaagcaatcaaacacgcctacatcgtgcaagcaatttttaggtctcctagtttctattattagagcctcttgcctaggattaaaggcccatggcacgtaaaagggccaagaggaaatttcccaggattttctcatgtagtcctcacaaccacccgacgatgcagacacttgtgcatccccttcacaattgggggaaagaggttctaaggacagaacagtgcctttgcactgcatgagtcagatcttgtcacttgtctgtctaagctggtgctggaaataatgaagatgagatggaaacaccagtccatttgatcctaagcaaggcatgggctcttgacactatagctgttgctgaaaggagatggaggaaggagaggcaaagagaatagaaagggatgtttctgagcacaagagtggaggaaacagaaggcatggatcacctctttaaccctgacattctcctagctcataagcacatccctgtcctttaacatctgggtgtctttctagaggacaccagaaacttcagacactgaaaggaaagacattctaaaaggtggaaagaaagtggcatttggggactgctataggcagtctgaatatagatgtgagtgataaacatatggggctcattactccaagaggcccaggcttcttctaaacaggtgtcaagagaattttaattgaagcctcaagccatgatgaattattaaaggcatggagggatgtgagtaggacatttcagctcagtcagtcagctccaggaacaccttggatagaccataggcagatgagcacttgggaaatgatctatataaagtacaataaacttctctgaaaattatgcccaccccaacctccccccactcacacatacgacttctttagaatccagcatttctcaacatgtatcccatagagcagtacctcgtaactttagcgtgcatagaaactttaatgtgtcctcggagtgtccagggtgggcctgacattctgcatctctaacaagctctcaagaaatgctgatgcaaccggtctacaggccatacttgaatagagaggttttagaatactggctaagcaagatgttaatggtcttcaagggaaaagaaaagattccagaggcaaaatgtttgggacagacaacattaagtttaacgagtatctgaaccaccagggaaagagggcagagtgtaatatgcttaaggctgttaagaggctttacagaaaacaaaaggagttccatggtcaaacacttttgggaggacctgggttaagttaaaggagtatgcagaacttctcagtgcctttacactgagccagatcttgccactcctctgtctaaagctggtaatgtagaagtctttacattggctgaaaaagcccccaggacttcactccttccttctccctatgtccaggtccacaggccttccctgagaagacacaataggcatccctcagcctcagggcctttggcctgggtctttcctctgcctgaaacattctctgacagctaattgtctaactccattgccttcttcttttctcaaaggccaccttttagatgagactgctctaaccaccctatggaatttcataacccacacctcttgcccctggcatttgcaatcccccttatttgaactttcttttttcttttcttccagtgcattttcaccttcaaagacaccatacaatttcataatttattgtgtttattgcttattgtttgtcttttccattaaactgtaagctccatgagaacaggaatctggttttttttccttgcagtattatgagtacctggaacagtacctgtgctatactagatactctaaatatttgctgaatcagcaattgggcagatgtccaaagtgaagttcttagtaggagtggaatatagtaagcatcattctccaaaggcttttcactgcagaacctatttctttcttatttcttttccaacggagcatctcagcatgaccactattcctaaatacacattttctaggaaatggctgctgtagtaactcactgagaatccagccttcattcattttcctaaatccttctgggcctattcatattcatcccctgacaatcccaaagtgatgaattccataagtttattacccacagtataaatttatctttaattctgcaagaacaatgtcatgggagggacacttacttcctgctctcctgcaaagggcccctcgatgccaccacagagaagaggcatagggtttcacaccatgccttataagcatggtgctccataaattcatatttaaccctcagagtaatcctttgaggtgagtcttaatcccccattatacaaatgagaatctgggtctcagggagattaagtagcttacagagctgggatttggataaaggtctgccatgccttgaagctcatatactctccacaacaccaatgtggcaaagctcacaaaatggcatttttcaaatgccaaggtacggaatcagagacttgggagctgtgtgtctgtccagagtgtctccctcattagcagtggccatagaatagcaataatagctactgcttattgagtttttactatacaccaatcattaatctaagcattttacatgcattaaggcttttaattcctagaaccctatggacctcactttacagatgaggaagctaaggcaattaaaaagttacatagcatattaacttacccaggtcacatggctgtagagcagtacttaggccagaatcaggggaaaaaagtcaggcaaggtgcagttttgaaccaactcggctgctcccatgaccacctcactatgctctggtgctcagtgccaaatccagctccttcttccctcttaggtgcacccagtgctccacagcagtcttgccccagcctttgcatctgtctcccagcactctgatatatgagaacccttttatggatgggagtgcaatttacagacttctgtttgcaatccctagcaacactttcccacacagcttccccagatgatccatgctgggcagctagggactggcaccaagaaggcacttggagaccgtcatattcagtcacctcatttgaaatctggggaacctgagatgcagaggagatgatgacttgctgaacacacacaatcagaaataaacctggactaggacacaggcctagaaatcccattccagtatcatttaacccattagccaaccaaccaactaaccaaccaaccaaccaaccaacgaaccagaaagcatttactgaggcactgttaggtgaaagtgccaaggaatgaccagggtttctgctctaatgcccactgacttatcatttgtgttcacccatgctttcactcattcatttccttattcaataaatcattaggctcaagaaataacatgataaaaaagacaatctcttctaatgcagatgagacatattttaataaaaataacagaggtatattcagaataataaacagtaataagagcttaaagaaataaaaaatgtttaaggtcttttgacagcatgtaatttgtgagggagacaggaaggaatgtgacctagcctggaaatcaaagaaaacttcctggaagaagtggcatctggagtgagatttaaaggagagtaagagtgcattaggctagaagggattgggaggaagagcatacataagagacctgagacagaatgaatgtaacacatttagaaatataatagtgtaattgtgaatcgtataatatagtatggtgtggtatacatgcaaacacatataaaatacaaggcactttccagggaaagcaactaacatttactgaatgattgctacatgccagtccctttattacctccttgctcagtggaaggtaattgaatcacgggagcaagtctttcccatgctgttctcatgatagtgaataagtcttacaagatctgatggttttaaaagaggagttcccctgcacaagctctctctttttgcctgctgccatccatgtaagatgtgacttgctcctccttgccttccgccatgattgtgaggtctcctcggccatgtggaactgtaagtcccattaaacctctttcttttgtaaattgcccagtctttatcagcagtgtgcaaattgactaatacatcgacccttagcagatgctgctgattttcccctaagttgctcccattcctctttaccatttctgcttgcctttcctccaggggctgtatttttgttgttgttgttttggttagtttttgcctctaatctaatgacctcttcctagtgttctcctcacaggcctgccctgaagctcctagatccactttgccattgctcccagagagctatcaagacctgggagctaagttatccccctatccctggtgactcttagacagtgactggttgggagcaggaaagcccagcaaccttgcccagagcaggggcaaaagcagacatgtaatttatactctagagctctgagtcaggctgagccaaaactttgccccaaattgttcccttgcctggcttcttccacttctatgcccctcctcccaccttccacaacttccttatttatttttcctgcaatttctccttaataaatcactcagacaagaattctcactattcagaaactgactctggggaacccaacctaaaacagaacccacatctgtctgaacttgaagccctttttcttgttagtgagacatgatgttaaacagagtcacaccagtgaagggtaaaggagtaggaatgatggtaaggtcaagagctggggaaggttttttgagtttagagatgaagaagaaagcccttggggacaagaaatctcaattaagcatccaaagactggcaggttttaagctcagtggagaaagcaggcctccaggattgggaggtgtgatatcaaacagaaggacacggcaaaggtgaccgaggtgcttacacaacagagggacttggcccatctggaaatggactaatttccaggaaattggaaaagagtgcacgaaaggagatcggggccagactgccaagggtttctttggtatcaggctaaggaggcaaacaggagtggagagaatatactcttttgtggtaggcacgccttggtcccagtgccacacccaccacttcccggctaagacctttaacaggtaattcagttgactcagcagtgaaatcaaaagacctacttttgaggattagataagaatagcacaattaaaatccctagcccattaccagagactcaaatgacactgttgttttttttctcattcttgaagtttgggcttaattttgtacaaggtgtcactgcagagactttgatcaagaaaatgaaacattcaaatatagaaaactcgtattaacaggagagaaaaggacaacttaaagaggcacacaggagacctggagaccaatgagtttttgcaggaaactaagcatgaaggaactgagcccagtctagggttgcagcagtgggaagaaggggaaagaggcacttccggtgatattgacaaggacagctggtcagcccttcgtgcataattagcatgcaggagtgaaagagaggcagaagcccaagctgtctttgaggttttgacctagtgcctgaatgcaaaagaatgagagaagaagggctagcttaagggtgaaggtggggaatttgatctgatgtatgttgagcttgactttacatctggccatccagagaagcagcagtatataagtccaaagagccagacaggcctggtcacagctctgcctcttactagctgtgtgactggataaatttcaggacctctgtgtgcctccatttcctcacctgctaaaagggaaaacagatacagggttgctttaaagattgaggcatagaaaattgtctggcaacagatagatgctcaacaaatgctaactttaaaaaaaaattttaatattcatcaggcaattgggatcgagtcttggagttggcctcagagctaatattgtacatttggaaagcaaaggactagaggaaatggctgaaacataagcacagttgagatcaattaccttttggaggaaaatgtcctgtcaaagaccaacaagcactgaagataaatgttaagttagttggcttcttctgttttcccacaaggagcacaactcaatttagttgtacaaacatttacgagccagacacagtggaaatggggaccctgagatgaagaagatgtagttctttccctgaaaggctcacagtttcttggagggatggacatatagaaaaaccaagcaaagcgcaatgtgagaagaattatgcaagaggcataaagggtgcaccaaggagggagtgatgaattttgcctagaggatttggagaggaaataactgaaacactaacatctctcccacagcattaaacacaaataaaaaaatttcaaataaatgaactatgaataatcacatacacttaattattagttcaaagatgatcattcaaagacaagaaactctaacaaaacttgtaactccaaatgtttaggttattgcagtaaagagagtaggggataaagaattgcagatctggaagcatcaaattctctagcttctaactcaaacagcttctaaaccacatgggttgtagatgaagtagttaactagggctgactgctataataaaaacatcaatctggatttttatgagtttatgggtgtgaagcttggtgttgacatgtgagaagaaaaatatcttttccttattaactgagtcttgagtagccactgaaaagatgaggatgatggagtcagagaaaatattcatagattcaactaagtcaaacccctcttttgctttactgataaagagaagacatcagagaggggaagtgactcatgcaaagtcaccctgctggggagagccaggatgaagtgccagggatcctgactcccagtcaagttctctttctacactaccactgtgtcttttaaatgaacccttaaatccagattcccccaatctatcctgccaccggctacatgtgcacatacaaatactcctaaattggccccaactggcccagcacctcctctgcatggagtaagggtctgctgcatccttgatcatatcacgtaggcaggaggcttagagctaaccacatggtctggcctccaggggaccatcaaccagcaggaagaattccccaaggcaatgcactgttggctttctcaacgttccacaaaataactgcacctgatattccccaccaactaaggcaggaggctctgctaatttcattaataacttaatgagattattaaccactacccagtgggggcagatttggtttttccttggttataggaatgtatccatttttcacacaattacagcctgagaggatcatcactgaggctgacaattgtgggcttattaggagcaatttagacacaagattggatttcctttctgcccataaccttttgttcaaagcaaatgaactggtgttcctcatattagtatattaataaaggttgtccaggaggtgtttgatctttaagattggcccagtagcagagtagtaacactgccctgggaggcagggtgccaggcttctcatgccagcttcaagcagccagcccaagccacttggtgtctctgagcctcagtttctcattacctactgtgatagaactggaccggtttggtggtttgaactagagacccacaagctatccaccatactttaagataactgatggaatcatctgtattgctgatctaacgctgcatagactaagtaaaattctgatatctctccttttgggcagaattatatcttctcagtgcataataccagctagctcagcctagtcagatgctgactggctgtcgatgacatcatgggtatttggaagccattagagaaaaacaaaaggggacacctgagaaaattgatttctaaggtctgtctctcgtgagcaattcattcatcgaaactcagcttccttgaccctgccaggctgaatttacttctttccttccaacagccttcatttgggatttcagttaactgtgcacacatgtgtcttttcccaaagagtctctgcttaccttaagggtgcggggtgaattcactctatccacaagtgtgttggagctaactcacattggctcgcaaaagccaattacctgcatttcttccaaaccctgagttcagtggactctatgttggcagcttgagatcagtcatggtggggatatttataacagagaaatcggcaaacactacaaatcaggatttgtttcttcccacagcgctggttgttaaatattcaccaacacatcactgactatatccccactgccaagcatttaggatgtaataagaacgtagttgagatttgatgaataaatgaatgaccagagtcagcaaacctgggtactgacgggtttcaagcaggctgaatgctatgtatacatgagttagaaagtgtcccgagtagcttgcatgagaggtatacaactagagcagtggcttgaaaccctggctgtatgttaaaattacctggtgcccagtccacagctcaatcctgaagtcctggagtgggtattggatatcagtattttctatgcccacatgatttcatgtttgagaatcactgatctagaaaagttcctggactaatcatggccaccataacacccagcctcagtgctccagtgcccatgactgcctaccactttaattcagggagcctgaaagtcaagcagaaatataatttcattggtagattggtagcttccctgtaattaagcagtaaggttacaaggaggtactcctccccagttggtatggtttcagtttttttggcacatgtccagaatgatgatttagttaggtagccatttaagagacagcatcttgacttgtccaaaagagaacagcagcctcagcctacaagtcactggtacatgcccatgaccccactctcctctactgccatgcgcctccctgcacagccacatggctgttatttttctctctttaaaggaccagcacaaatactgcctcttctttgaagttctttgaggcttttgccagtgtgtctggctgatggctggagagatcaaggagaaacagactctgagttgaagctccagctctagaattcatagctgtgaaaatttggcaagccacttagcttctctgagccacatgttctgcctatagaaaatgaagtgggtagcacataaatggatacatctggatgtgtttggtatcatgtactggaagtgggagagaactgaactgtgatagtttagtctagtgtctgttctgccccctcagtagacattcattttggtcaagtcacattcctctctgatcctcactttcttcctcagaaaatgatggagtctggttagatgctgtggacgggctttttcagttaaaaatgaacttactgtctctgcctcttgcttggcatgtgtctgccttccacagtgactgatctttttctatatacaacctgtctttccaaccagattagggaaccccaaagagtagtgaatgtgtcttttttgcctgtgtatctccagagcccagaacagcgctccaaacttagacatgtattagattaagctcctatcaccttagttctcccctgctttgcaaatatttcatcaaatgaaggggccagctcaagcctattacagagctgtctgaggctggtgtatcagggtcccgtgccccagaggatctaaagctgctataactacttgtatattgctcaatatgtgtcagctgccagcaaaggactatgggtaagtttcccaaattataagaagagccatgtggtaaatcaccaatggattaggcacaggatgcaaagaatgttctttcaaatgtcacccacctggaatgatgcatggtgccatgaggaacacggcacggtgtcacttggacatgaccaaagtagaccgtcagaagtcacagcacgctgtagggccagatgaatttcctgaccactcctctgtgggtccctaagtcatgaggtacactaggcaatatctactcagtaattgcctctttccctaagtgagccagacccaatgtgttttttatttctccttaaatgagaatttgctagcaggcctgtattttttctcgcctaataacaagtgacagcaacgtgcgaagttagctgtagcaggcaccgaggactgaattttgcaaactcccaaacaagctgagaaatcagtagctgaccctcaaggtccagtggtatctagtggtcttcttgactgtgaacccactagaaaggattagggaagcccttggtaccagacactcatagactttggagtggggaaactgatgattctacacctactaggaagttttactgatcccagattggcctatttgacccaagtattctgaaggattggggacaatgcagaaaaaaaacggtgcttcttgagatgagatttcaaatattgctctctcaaggaggtgatctatatgtatgatttcaacttttcacatatagacccttcctagcattggggacatcaaagaaatcctgagatgtgttagaggactccacatttctcataactagcttgcctactagctgcatgacctccatccaggactgtacctatggccatgaagctcaaatcccacacaacaccaggctgtgtcatccctgtagacagtaacaccaacagctcccactggagctgtgaagcatggcagggagattttatctctctgataaatttcttcatttgtagagacaacaatgtcttattcacaggacaattgggtggataaaattgggcaagtgggtgaattaggcccttttcctgtcctcaacacaaagtccaatcctgacctcttaaccttcaaggcttgagacctggaacctggcagaaggagagtctcccctgtccatcctttacccacctcttctacctcatctcctcctcactctctggcatgtaccctggctccttccataatgaactacactctcttttctctgtgtatgtatgtgtatgtgtcttttttaaaaaattgttcttattttattctattccagctttatggaagaacaactgatgaagaaaaattgtatatattcccggcataccatgtgatatacatatgtgtgtatgtatatgtttgtatatacatacacacgcatataaaccacaatctgtgcgtgtatatatgtgtgtgtgtatatacacacacacaaatgcacgtatatataccacattgtgtataaataaaataccacattttctttattcattcacccattgatggacacttaggttggtttcatatcttagctattgtgaataatgcacaatgaatacaggagtacagatatctcttcaacatacagattttatttacctatttttggatatatatccagaagtaggattgctggatcaaaagagttaatcttttaaggaactaccatactgttttccacaatggctgtagcaatttacattcccaccaacagcgtacaagggtttccttttctccatatctttgacgatacctattgtctctcatcttttttataatatccattttaacaggtatgaggtaatattttattgtggtttttatttgcatttcctggatgattagtgatgttgaacattttttttcatatacctttaggccatttgtatgtattcctttgaaaaatgccatatttagtttctatgaccatttttaatcaggttatttgttttcttgctattgagttgtgtgagttctttacacagtttggatattaaccccttatcagatgtatggtttgcaaatattttatcccattctgtaggttgcctcttcattctttcaattatttcctttgtgtgcagaagttttttagtttgatgcaatctcgtttgtctagttttgcttttgttacctttgcttttggggtcatagccaaaaaagtcattgcctaggccaacaccaacaagcttttttcctatgttttcttctagcacttttacagtttctagtatcattgtttaagtctttaatgcatttcaagttaattttttacatagtatgagataagggtccaatttcattcttctgaatgtagatatcaagttttcccaacacagtctgggaaagaacaaagactgtccttctcccattgtgtgttcttggtgcctctgacaaaaattaattgataaaaaatgcagaggtttattttgtgctttctattctgttacattggtttagatgtttgttttaatttcaatactgtgctgttttggttactatagctttgtagcatattttgaaatcaagatgtccaaggcctctggctttgtatttcttgctcaaggttgttttggccattcagggtcttctgtggctccatgtaaattttagggttgtttgttctaattctgtgaaaaataccattggaatttggatagggatttcactgaatctatagatcactttggatagcatgggcatttttacaatagtaattcttcttacctatgaacatgagatcttttcatttatttgtgtcttcagttcctttatcaatgttttctagttttatgtgcaaaaatctttcatctccttgttaaatttagtcctaagtatttgttatgctattgtaaatggtattgtttcctaaatttatttatttatttttatttttattctttttgagacagtttctcactttgtcacctaggctggagtgaagtggtgcagcctcggttcactgcagtcttgacctcctgggctcaagctatcctcccacctcaacccccaaatagctgggactacaggcactttccaccatgcacggttaatttttttttttttttttttttttttttgtaaagacaaggtttcgccatgttgcccagggtggtctcaaactgctgagctcaagcgatcggccagccttgggctcctgaagtgctaggattacaggtgtgagccaccatgcctggctctacatttatttcttttagatatttttttcatcattgaatacaatgctacctgtgggcttctcatatatggtgtttattgtattgagttatagttttatacctaatttgttgagagtttttatcatgaaaggatgttgaattttatcaaatgctttttccgcatctattgagatgatcatataatttttatccttcattctgtgaatgcggtgtatcacatttgctgatttgtgtatgctgaatcatccttgcatcctagggataaatcccactggatcacagtatatgatccttctgaggtgctgttgaatttggcttgctaatttttttttttgaggatttttgctttacattcattagggatattggtctgtgattttcctttctgtagtgttcttgtttggctttggtatctgggtaatgctgacctcattaaatatgtttggaagtgtttttctctcttcaattttttgaaaaagtttgagaagaattggcattattttttaaataattgaattattttttaaatgtttgctagaattcatcagtgaagccatcaggtcccaggctcttctttgttctgagatttttgtttactgattcaatctcctttcttgttattggcctgttcagattatctgttgcctcatggttcagttttggtagatggtatgttccctagaaggttattcatttttcctaggttatctaattcattggcatgtaattgctcatagtactcccttatgatcctttgtatttctgcagtattagttgtaacatcttatttatttataattttatttgagttttctctttttcttagtccagctaaaggtttgccaattttatttatctttttaaaaaacaactcagtttcattgatatttttcattgttttgctcatttgctttattgatttctgctctgatttttattattttcttctttctgctaactttggactttgttcttcctttctagttccttgaggtatacagttagcttgtttatttaaaatctttcttttgtcttaatgtaggcatttattgctataaacctccctcttagagcagtgtttttctgtatcccataagttttggtatgttgtgttttcattttcatttttctcaagatatgttttggtttcccattttatttcttctttaatccattggttattaagaatgtgttgtttaatttccaaatatttgtgaatttttcacttttcctgctggttttgattttttatttcatagcactatggttgaaaaagatactgaatatgattttaatcttcttaaatttgttaatacttgttttatagtgtaatttgatttatcctagagaatgttccatgtgcacttgaaaagaatatgtattctgctactgtcagatggaatgttctgtatgtttgttaggtccatttggtctatagtgttgttcaagtctgttgtttccacattgattttctgtcttcatgatctatccatttttgaaagtgggatattgaagcctcctactaatgttgttgtctgttttaccctttagttctgttaatatttccttcatatatttaggtgttccaatgttggatgtatatatatttataattgctatatactcttgattaattgacccccttatcagtatgtaatgaccttcttcatctcttgcaaccattttgcacttaaaatctattttgtccgatataagcagagctactcctgcttttctttggttaccattgtcatggaatacctttttctgtcccttgaatttcagcctatgtgtgatcttaaagctgaaataaatctcttgtaggcagcatatagttgggtctttaaaaaaaatccatttagtcactgtatgtcttttgattggggcatttaatccatttacacaaagtaattatcaataggtaaggcattactattgccattttgttaattgatttctgattgttttgtagtttctttgttcctttcttcctctctggttgtcgtctttcatgatttgataatttttcatagttgcatgctaggatttctttctctgtgtcttatctgtatgtactacaggtagtttacttttgtggttaccataagtcttacgcaaaatagcttagagtataacagtgtattttaagctgataacaacttaacttcaatcacatacaaaaattcttcactttggctttcccttttctcacattttatgttattgatgtcacaatttctatcttttatatattgtatatccattaataaattgttgtagctatagttattttaatatcttttcctttaacttttatattagtgttaaaagtggtttatacaccaccattacagtattaaaacattcaggatttagctatatttttacctttacagtgagttttaaactttcatgtttttatgctgttaatgtccttttatttctaatagaaaaactttcttcagcatttcttgtaaagtgctctagtggtgatgatctcccacagattttgtttgtctgtggaagtctttatctccccttcatttctcaaggacagctttcttaagtatagtatttttggttgaaagtgttattgttgttttttttttttctttcagtcctttgaatatatcatcccactctcttctggccttcaagttttctgctaagaaatcaattgatacacttctggaggttcccttgcatgtgacaagttgcttttctcttgatgctcttaaaattctctttgcctttgaatttgagaatttgattataacatatgtcagtggagatctattttttttttttttttttgagacagagtttcactctttttgaccaggctggagtgcaatggtgcgatctcggctcaccgcaacctccacctcctgggttcaagcaattctcttgcctcagcctctcaagtagctgggattacaggcgtgtgccaccccaagcccagctaattttgtatttttagtagagatggggtttctccatgttggtcaggctgatctcgaacttctgacctcaggtgaaccacccacctcagcctcccaaagtgctggcattacaggtgtgagccaccacacccagccaaagatcactttatatttaatctatctggagttctttgggcttcataggtatgagtgttcattactctctccaggtttgggaagttttatgtcaccatttattaaataagctttctgcccattactctttctttgctccttcagggactcctataatgcaaatattgatttgcttgatggtatcccccacgtcctgtaggctttcttcactctatttcattcttttttctttttattcctttgaataatttcaaattacctgtctttgaactcactaaatctgcttgattgagtctgctgttgaaactctttatgaacatttttagtttagttactgtgtttctcagctccagaatttatctttggttcttttgtgttttttctgtctctttgttgaacttctcatttttttccatgtattgtttttctgattttgtttacttttctatctgtattctcttatacttcactaagcttctttaagaggattattttaaattatttgtcaggcaattcatatagttccatttctttagtgttggttactggtgctttattttgttcatttggtgggatcatgtttctatgaatatacataatccttgttgccttgtgttggtgtctgtatttgatgatgtaggtacctccttcagtctttacagactagcttcagcaagttaatctcttcaccagcttactttctcagaagttctgggtgggccatctgatgaggtccatgggtgggcttgctgctggagtcctcatgtgggaggtcctagagactggtccactggtgtgggcctggagtttgggtctgtgtggacaggcctggtgtgtgggtccatgggggcaggcctgaaaactgaatctataggtgtaggcctggaccctgggtccagtggggctggtgctggtctggcatcagcatccactgaggtggtcctagcaactgggtccatggagatgcacctggagtctggatcttcaagagaactggggtgggtctgaagcctgagtccctgggagtcggcttgtagccgggctggggctgtctgatctggcctggagcctgggttaggcctaatgccatggtccatggcaaagatggatgatcgcttcactcttcttcccccacatagagggtatctccatgatgtattgcctgggcttaggagaaggatgacacaggtaatgtgaaactgtcctttctaccctgtttagtgcatcttttcttatttctgtgttccacttgggtgctgtactctctctcctggattccttcagctcttgtgaagatatttttgcacatggatagttgttcaaattgatgtttctgcaaggatatgagttctgaaaactcctatcccttcattttgttgacattacttctatgtgtgtctttttatgggttttacttttatttattaaaacaactcatgtcaccattaacattttatcctcttactctgttctactcacatccctcaagattcaaactctcctctgaaagtgatgccatgccttccaggcagccttctctaactcaatcagtattttgagtctctattcttgtccacgattgtctatcaacttcaaacccatccttctatacactgttttgtgataggactctacaaaccacatttctgcttttccagccagattcctgttgaatgttgccaacagagggaactataaggaggctgcaaggtaggagaaaaaagaagaaattcctgtctttcaatttacttcctgtaaacattctgtctgcttccttttcttagcagcatcatgccagtcttgcattccatcccagaagtagtattctggtcctgtagcatcagttggatccaggcttcagatttttcccaacatttaagaacacattttattgtatttcctcagcaacatcaacagcaactggttggtggtcccttctcagaagtccgaattaaacaggttgcctccaacatattcagaaccactagcaccagcaggaaaggtgctctcctcaaagagcttaatttcagctctgcagggtctgatctccaagattctatattttaaaaattccaacatcttcattttgtttcctcagtccaagggaaactgtgctgtatccggaataacttattgttttctctttgccctttgagttacctagttaacaattcattattcctagtgaataattcttttgattgaattctctttgtttaaaaaaagctggtatggtttttttctcctgactggatactgactgatacctccacatacaatttatgatttacatctatcaaatgtatcaaacaaatacattgctgttatctatcattaatctcactcctgtctttcttctttctattcctagggccaaaagtagtgtctgactcaataaacaccgctgaatttttgaataatagcagaataaaaaggaatgaatgatgcctatcagagacaacacagttcaaggtataattgttgggacttctgctctggtctccttgctgggatggttgtgggtcagagtttatccagaaatgttccaatacgacaaaaaaacctcacagttgagaagccatggaatcctatctcaagtagttcacgagaagtcgagtcaataaaagagagggccctgtggtcttgatatcaaatcctggctctgtaacttaattactatgagactttgagaaaatgacttaacctctttgacctcagttttctcattcataagatatggatgataagacagatttcacaggattctcatgagaaatgagatgaagaaaaaagtatgcaggtgagccttttgtagtagatggtacagagcaggagctaaatatttgagtcatcccccttcacctccccaacccatctgttgcttgacacagcttaaagcattagtgggaatcaaagagatttcattttccaaatttctcaaaaagaagggcagactgtgatcagtcttcatcaccatcattaacaccattatcatcattatcattgtcatcatcatgatcatcatcatgattaactgatgtttccagcaaggctaggtgctttgcgtgttttcttttgtatatttttcacatcagtattttcctcaccatttaaaggtgagaaaactttcagaggttaaatcactgcacgaggtcccacagctatacattatcagtgctataaattgaacccatgtctgtctgggcccaagacccctgctcttctctctcactgcctctgaccacagcgagcaaaagtcagtcagatctatcctgtgtcctcccatgaagcagatattggctctaaagactgtgtgtttccgtatcattggcacttggcctgacttgcaatcctccctggcttccttttttctgcccatgtccatgcaacaagcatcttaaaacagccagcatgcaattggccatctgatgcctgaacttgaggtcgactacagaatgctggcatctatgatttgagtgccttcctgaaagacctccttcatgcattccttcctactctggttaccagttatggtgggaccctttggatgagagtttgttgagtactttatctcttatcctcagccgtgatgaccagttgataaaaggagaaggagtaaagtatgggagatgggagaaggaaaaggaaaaggaaaaggaaaaggaaggctgtaagtctgttttagtcattttggtcaccagctttggagccacctccttaggaagatcataaaccatctaggaatgcgaaaccaggcttttttggttctgcatccaccatcccctcccaccacatcactcagtgaagagccaaacccataatagacacagactagcaacagcccaagaagtagtggtatgcagtaggaattaagcgatctgtcttgtcgttcttgttctgccaacgatttgcttcaggcaagccactgttcatctccctggactatagttccctcctccaaaggaggaatagtgtgctgctgtagaatagacatgagctatattcagagagacctgactttgaatgcagtcatggccttttctgtgaccttacgtgagacacttaatctctcttggctcagtttctgcttctgtttagtgagaataagaacaatacctaccacatatagttaggacaaagactaaaccattgcagagtaaatatgagcttcttgcccattcaatgataagggattggactagatgatttttgaggtcccttgtaggcctgcttttctgatgtcccatgtggcaaacagtgcatttctgcacacaagaaagaccccttactttatagctaactctaagcatggcagcatgaggggtgggtgggggtagggaggtagagttcccaagttcactgcatttcaccttcctgccatgaatgatgttcttgtgatgtgctaggggaccacaggaggtttctggaggaagccatcaaacattcatgcttatgcctgatgctagactagacctaatgctatgcattaggtgctcagctctctttcaggggatgaggggtgagcacagccccctttcacatctcccatagcccactgcttgcccttgcctaaaagattcatcttcataaaagtttccaacatcctttacctaacctccatctaggctcaggccctcatcaactctccctttttactcctgtaaggctcataaagggctcttctgcctccagtcccagcctgctccaacccctttctcatcctggtgctggacacactgccagtggggctcacctacatgctggccacagatcattggtttctcgatacgtttctattatcttcaaacttttctacagtgagtatggattatttttataatttaaaaaagtttttaaaagctaaacttaaatatgattattcctctactgaacacctttttctctccccctgttatctttaggatagtgttgagtctcctgagcttggtacagttggccacttctagttccccccgccctcaaaagctcctctatacacatcacataaagacacttactttcctccaaatgcctcattctcacttattctccacacctctgggccaccattcatatagatccacctttctgggatgattttacctggagctctcacaaataaatctctacttagtcttcaacatgtaaaccaaaacattatctctgctgcaaagtcttccctgactacccacggtggcccttgcctgcagagttaacagttgtgtaccctgatgctgtagtgtcacttacttacatctactggagaaaagatcatactcaactgtggccatctctttgtgccccttcctgatttgatcatgagatctttgaaagcaaagaccttcatctgagtcatgtttgcattgctggagcccttcaaacatgtctgctttccacatatgcgtatgccatgcactgtgttaggcaccggatccattggggtgaataaacaatcatggcttctgtcctcctggggcttatagccaaatgggaaagacagaccaaaaataaataagccagcaactcaataagaaatttaaattgtgaaacacgtgaaggatgcagttggtgccctgataaagactaattgctagaaggggattacttaggattctcctaagaggcttctctgaggcgatggcatttaaagctgaagtgtttaggatttgaaggagccctccagctgaagagctgggagagctttccaggaggaagaatcagcatgtgcaaaagttcacggagtggagagagtctggcatgcatgaacgaggctctggcagaggccagggtggctgcagcccagagtgtggcccagtgcaggatgaaatgggatggaggagatgggcagagtgtggattcatttccaggtgcaataggaaggtgttgacttgttttaagctgggaagtgacatgactgaatttgagttttaaatgattactctgaccttcaggttcctcacctgaaaatcagactcatatcacctactttttaggtttttcttaggtgagagccattgttatcttatttttcttaaggtattttcacttatttttaaaaatatttattttttagttttgattgatacagaatcattatatatattcatggggaacaatgtgatgatttgatacatgtgtaaattttgtaacgatcacatcagagtagacctctaagacaaaacccgaaatatcaaaaggggctgacccatggagagggcagatttacactcctgggcataggaactagataagttggtcttcgttgttgttattgttgttggtgggttttttttctttagttgtttgttttgcaaactgaagtctgagtagcttgagatttggtcaaggtctactctgtcagaactgatctctacttctggcagctaaaacgcctgatcatccagtggtgatattttacagagatgaacaagctgcctagaggagtgggaaaccagccagatatccccatcctggtttgaccatgcctcatggaagggacatgacatggaagaccacaatatgaaggactctgaaataatcaaagcaaatggcatcttttcctggaaggtaacagcagcccagaggggggaaggaagattctgaagtgacaggagagttagcatcaaaatcgattttagagctcaagtctcctaacctaagtctggagttcattcccctacacttacttgtcaaaaagggcaactcccatattggaggatgtgccccgtcagggagcctttgaactcatcttctgccaaagtcaggtttcagcaacttcactgttgctaaactactcaccctggggaggtgaatgtgcttgtgaagtgaatggaaattcactcttcctgactgccaacccagcacacagaacttcttgctttggcagaataaggaggtagctgtgttctagactgggagtgctgggataagctgcttacacttaactcagagtagtgctcaaagggccagaagacattatctggcattcaacatcaaccttaacagaggaggtacccaagcccagagggcaaatgacttgcctgatatcacatggaatgcatggcagagccagaatgaggtcccaggtctcctaactcctggtccagtgctcttttcagcattctgtgccacctctcctcttcaacactgctttgaaactgcatcctgcctccttctagagcatgcatgtccaagagctggcatcaaacctcgtttctcccaatccctttgcagggtgttcccaaaagcatccccaaaagagcttgctgattttagaagcagaaacgctttacagttgcctaatggtaattcctaggtaagatgcactaaatacccccaatgaaaatgtatttagtatgtcttacataggaaggctcccccaccccctccaacacacaaacatactccttggttcatttttcaatcactcagtttctttgagtttctaaataggtaaatcattagttcttcctttagcatggatggggctgggaaggtggctcatgtgcgtatgtacagtatagttcctcatttggctcaaaacaatcaacaaaaaatcaggtatttttattcatcccattttactgatgcatacatttaaccattctccaaatgcagtaattatgtcactatactattccagacactgtgctaagcagagttcctattctcagggagatggcactatgtcagaatggagaaactaaagaccagaaagttgaaatgacccgcccaaacttgttctacagtaagccaagccatgaatcagtctcttttttaaatctcatactctatgcttggcactgagttacagcttgttaagattgaggctgggacaagatgacacccaggggagggactcattcatcttctttgtcctttctgaatcttagagtgattctagggcaagaaaatcatctcttcttgcaaatgactggtatgtagtagctccctacaaaccatgccatgattaggcagaaaggagagaaaatcagcaagctgaacctgggtttgtctgtctgagagagaaagagagagggagagagagaccaatgctgcaggaatgggcctgaggagtcatacatatctaggaatttgttattgtgacaagggaagggccttccctccctgtactcacacacttggcccctgtatggaggcccttccctcccattcctccactctttgagagttccagaaacccttctccagcaccctggttcttccttgcccaaagcgaaggctgcagctcccctagccatcccaagcatgtacagagtttgcagagaacatgtgcatttgtttttcaaaaatgaaaagtctatcagagtggagattatggaagtggagagaactgacaacaaggacatttgggcatgaaagacatttgcctggggcttcacatttggatttagcctcaaatttagacttttgattcctaaatgaggttatagaaacagatgtggccattttgggatatttgagacagagatttgttaaatgcaaatatttagcacagtccacctttttttttttcccagcccaccattttgtaatcctgttttatcatttctcagaataacagcccggaaaatgggagtcctattcgacttggagagaccacctctgggaagtcaaatgaacagagactatcgccctcactccgcagatggagaaactgagatccagagccctcagctcagcatcatctaaaagaacaaccatattccttgtgtctagcagcagcctagagatgccccaaggctgcatcatccaatgtgaaagccaccagccacactaggttattgagcgcctgcagtgtggcaggtctgaaatgagaatggctgtcaatgtaaaatacttatcagagtcctgaagacttagctcaaaaaaagaatataaaatatctctttaataattttttatacatattacatgttgaaatgatattattttggatatattgggttaaataaaagacattataagaactaattccaccccttgcttttaactttttaaaatgtgactattagaaaaatttgaatcacatatgaggctcacattatatttctattagacagctctgctctgagggaagtaagtaccatttatcccaagcacatgctggtttatattgcagcagggggcatttctgctaaatgtttaaaaacaggccttgaggagtttagatcagctcttgcccatctcattggcaatgacctgaatttggggattggaatgagctagagctttcagaaccccagccttatttctctatttctgaatgtacagatatccattgagtgaggtcagggcagtaacgggaggggtgcatgaggagctaacattttgaatgagaccatcacactaaatgcaggcttgctccctataaatcaccttgatttgtcaccaaatgagatgacaaaatgagacatccaggcggaaatgaaattcccgctgtaacagcagcatcgacccactctgacttgcagtgcacagagggttgtcacacatgagtttgagcaccagagtatcaggggaggctccacgtatctggttttgctcctgggctggtgggcaggggtgagtcagcccttaactattgggcagtggggatatgaatcacctggtcattccttaggttgggctttacccagggctcagggaaaatgttccgaggtgactttgacctatctggggctggacctttgagttcagactgtggaacaattttgatataacccaaatgagcactggtaaagaagagcaccagcccctgaggtgccagcaagctctaaagcctctagtggcctccccttctgaaaagaactccaccactgggctgtatcctgggtgctcaagctgtgcacagtccatctggagaccaaagtgcagctgattctgtcctttgttctctgggaccttgagttatccctccatgtctctgggactgatgccttcttttgatcaactgtgttgacgttggcctagatgatgtctcagggttttttcaactctgacacatgccctatgatgtgattctaacacacacagatacgcacaaacatacaaaaacacacagagaggcacacagaaacagacacccacccacacacagaaatacacacagggatatacacagacataaccacacagacacacacagacatgtacagagaaacacccatacaaacactcagacccatagatacacacacagacacacccacccacacacaacccactgattcaagtggctacaaaaacctaaacaacttaccaataaaacactccaggctccttcaatccactgcaacccctgctcagagtgttgtcttaattaatgcttctagtcagacacatgcacaaacacacatacacagacacacacagattcctgcagtcagacacatgcacacgcacacacacatacctctagtcagacacacacacacacagatgccaaagtcagacacatgcacacacacacacacacacacagacacacacatgcctccaggcagacacatgcacacacacacacagacacacacagatgccttgagtcagacacaggcacacacacacacacatagacacatagagatgcctccagtcaaacatgcacagatgcacacacacatagacatatacagacacagacccacagacacactgaaacagaaacgcagccacacacatagacgcacataccttggccctttctgttttcatgcccgtgccttcctcctacctgcccccagccttgcttcccacttaaggtctatttttttgggctcaggtcactcactaaggcaagggctacactctattttgcaggtaactcccagcaacatatccagttcacaggcaacactggctacctctccacctcccattcatagcccaatgtctttaacctccccctcccatggcttcttctcaacaacccacaatgtgtttgaattccctacatgctagaaatcctccattccccgccctcctccctagcccatctctccttccctttgccgctgagctccttgaaggagaggttaataggcatggcctccgcctccactcctcccagcactcctcagccctctgcctccaccactccatggaaacctctccagcaaagtcacaaaggggctaattgccaaatcaaatgcactccttttagtcctcatattaccagacttttaagtagcatctgaccccatggctcgctcccttctggctcctgtgacaccactcaccccactccccgccccttctctgagtgctccttctcagtgttcagcagtttacccttcagacactcctgtgtcccaaggtcctggcctcagccctcatggacacctgtgccttgcacctgacatctcaggtcaatagcagtcagttgggcattttcactcatggttcctgcaggcacctccaggaggccagactgaacttaccaacttttctctgttctgccaccacctccctccttcctccctccccttattttggttatttgcaacaccatccctgcctgacaccaagccagggggagtctagaagtcaatccagatttccttcccattccttgtaatccattgcattcaagcggtcacggaaacctgaacacctcattgatgagaaactccaggcccccgaaccaccatgacccaacccacagaaatatctcgatgcctccaattgtaacatgccatcccaagccacatttagacagtagctacctgtctgaaggatgcagtcccagcatctttatagcctatctccactaaacgtctcagccttctctggtgccactcccttgaaacatatgcaataccacggattttccagactatttttactcgaacattttcatgcggttgcacatcccacaactggcctgggtactgctacaggctgcatggcctccctgtgattcttggtctgctttaaataattaaatattcaacaccactgttgccccctttagggagcttttcctgatgagccctctcagcctttagaaagggttaaatgcctctttctggtctcagagtgccctgtttagattttcagtataaccctcatgcggcccaatatcaccttagatttgcatttttttctctcctactatattgaactccttatggacagagaatgatttttttttttctaaattcccggagactaccacagtcacagtacatagaaaatgtttattgaataaatgaatgaatgaatgaggcaaactaactcagcccagggaaagagttcaggtctcactcagagccctgcttttttcctgggaaggtcaagcgctagtgtgggttcctggtgacacctagcaacagttgccatgacaacagaaagcaccattttctcagggcaatgtcccccacttccccacctggctctggaggaggcagcccccctgctttgagtcaggaagcagtgagggggacagcctcactgaaatagttgatcatgtgccctggctcaacccccctggagaggggaacctgatggaaagggagaaaattggatttgatggaatcagatgtgcctgggagctccaggcaaagaaaggaaggatagacgggggccaactggcagtggaatcctggggtaaccagagggagagtttgtcagaggagtctccatgtcaacagggagctgagacgagatgttgtccctggggttgggtggagcacagcataggaagggtgggaaagtgtgggcctgagagatccaactggaacacagactgtagaactagaatgctccgcctcccaggcccacccccttccaggtcctctgcaaaggtctcttcctggggcagctcctacagttcctaacggtcccctttgcaatttgccatacatgcaatggagtcaataagacccttgaggagagaggttgtgtctgttttaaccatccctgcattcccagtgcctagcatagaagatgcagaataaggagtttatgaacaaatgaaaggctgtgctgagacaagatgaggggcttcagggctaggtggccaggaagagaagccactgaaggcctattccttgccagtcacaccacatgggtgctgttatggaagatgaggaaactggggctctgagagggtaagtcgcttctccaggccacattgctaaagggtagagtcagcatatgaagaggcttctgactggagggcccaggacttctctttacctggtttccttgtcctacctttaccctcagacatgtgcatgcactctccaggcagggggcacctgaataatagatcagatggcctctgctttctttaccccgcagccctcagtgtgcctggccctgatagataaggggtatgggatacatcgtggacagatggacaccaggcaggttcaaagcagggagtctgccagtctatccggctaagagaccttaggatagccagcaccccagaggggagagtcaacttggtaaagggagtctccccttccttttctcctctcctagagctgctcttggttcattactggacatggtgatagtttgggggagtaataaaggaaattcccatttattgggtacttactatgtgccaggcactattctcagctctttatgtgaattaacttacttcatgatttcaataaactaaatgaggtaagtaatgcttttaatctgcttctacaggagaggaaatcaaggcacagagaggttaacttgatggtcacccatagctaccatgtggcaaggctccagatgtgaaaccaggtggtttggccggagcctgtgctctaaccattatgccactcttcctccctcatctggcagtaagtttctgggctttgcattcagtttggggtgccaccatcaggagctcgagacattggctatgctatgtaacctccctgagcagaatgcagggagtgggtaaagtaagaaagggtgccctaaatatgaactccttttctcaggctttgggtagcttccaggccccgtccacagacacctaggtgcaaggcccagccctgctctgctctcaaacaccaaacgtggccacaggcaggcagaaaccaagcagcttcagaacagaagcctagaacaccctagctgccaatctggtccagaccttgaggcccacttctgaaaactgagcccttgaacctctgcttccttatctctgaaatggggacatggatagctccccatgcatgttgcaaggcttaatgggaacgatgcatatagaatgcttggcatgtgttaggtactcactcacaattagtagtttcttttatcccagatccctccgccttaatcctcttggaaataatatcgctgcattttttttttttctgagtcttgctctgtcacccaggctgatgtgcagtggcacaatcacggctcactgaatcctcgacctcacaggctcaaacaatcctcccacttcagacttccaagtagctgggactacaggtgtgcaccaccacacttcgctaatttttctttcttctgcctttttttttttttttttttttgtagatacggggctttgttacattgcccaggctggtctcaaactcctgggctcaagagatctatctgccttggcctccccaagtgctgggactacagggacgagcaactatgcctagcctatccccgctcttcatctttaagtctggggctacaatttggggtgacagaaaggctcttacttccaatgtgcaagggtagagactccagtttaaacctcatcacagtccagtttccctgtagtggtcttgggctgccctgtcaaggttttagttcacagctgaattccacaggaaatgcaaggctcccacagctgagagcctaccagggattccaggccaaagaatgttgagtgtgatcctgttggagtgccatccggccaggccatgtatggctcatctcagcttcatgaggcccaggggcgaggctctgctacagagcatctgctctcctatctcagaggctgctgcctcctcccttctcacagggatgttgtggaatttttttacaataagccctcatcttcatcatttcaaaaatctcatgttctggagaaatcagctaccctatgatggccacagaagagtacatgaatgagaaaactctaattctatattcctttcgtaataagattttcttagcatgttttaggtttggactttgccaactcctttggtccttgtgaaatagtaagacgtttaggttaaacaaaataaaaaacaaacaaacaaaacattttactagttgtgtgaccttgggcaaatgcccaacctcttaagattcagtttctctttttataaaatggggagatgaccaactcacgtgcctaccatgaggctcatatgggataatacattttaagtatatagagcagatgctacaatggtcacaaaactctttttatattggactgtcaaaataaatgtacctctcaaaacataaaatgaacatgtcctttcgtccagaacatgcaagcaatatccatcgatatgtaagcaaaagtataagatgtgctcatatgtatattcaggattagaaacaatgcaactgcccatggccaggcacagtggctcatgcctgtaatcccagcactttgggaggccgaggcaggtggatcaccaggtcaggagatcaagaccatcctggataacacggtgaaaccccgtctttactaaaaacacaaaaaattggccaggcgcggtggtgggcacctgtagtcacagctactcgggaggctgaggcaggagaacggcgtgaacccgggaggcggagcttgcagtgagctgagatcccgccactacaatccagcctggacgaaagagcgagactccgtctcaaaaaaaaaaaaaaaaaaaaaaaagaaacaatgcaactgcccatcatgaatccatctttacagcgcaacattatgaaataggtccccagatgatggaaatgtgtttgaggtaaacaaatagtgaaaataaaaccccaccaaagtgcaaaacagtatatttaatacagttgctatatataaaaaaggagatggttatagatattggcatagctatagatatgcatgtgtgtgtgtaacctatctttactggaaggatccagaagaaatttttaacagtgtttaactttgaagaaatggattggggatctaggtgtggaagatgactttgactttcattttctaccctcctgcagtgtttggatatttgtatcatgtttatatgttacttttaaacaatcggaaggatagatcacagatcaacaacaattgtaagtgcttttaaaaatttacaaagcctaagatattcatcaggatgcttaacattttagtttatcagaataaaatgaaaacctgaaatgtgcctcattattttggttatctattgctgtgttaccaactactttaaaacacagtggcttaaatagcaatagtttcatcacaggcataccttactttattgcaccatgatttaatacacttcacagatactgtgttttttacaagttaaaggttatgcatggagcaagtctattagcatcatttgtcaaatagcatgtgctcactttgtgtttctgtctcacattttgggaattctcacaatatttcaaactttttcattaccattatatctgttatggtgatctgtgatcggtgacctttgatgttactgatgtaattgtttgggggcatcatgaatctcacttatataagatggcaaacttaatcaataaatggtgtatgtgttctgactgcttaaccaactagtcattctcctatctcttcccctttcccctggcctcactattccctgacacccaacaatattgaaattaggctaattaagaaccctacaatgctttctaaatattcaagtgaaaagaagagcaacacatttctgactttaaatgaaaagctagaaatgattaagcttagtgaggaaggcatgctgaaagccaaaaaggccaaaagctagtcctcttgcaccaaaaagttagccaagttgtgaatgcaaaggagaagctcttgaaggaaattacaagtgctattccagtgaacacacaaatgataagaaagcaaaacagccttgttgctgatattcagaaagttttggtggtctggatagaaaatcaaaccagtaacagcattcccttaagccaaagcctaatccagagcaaggacccagttctcttcagttctatgacatctgagagaggtgagaaagctgcagaagtaaagtttgaagctagcaaaagttggttcataagatttaggaaaagaaaccatctccttgtatgtatcttcaccttgcataaaagtgcaaggtgaagcagcaaatgctgatgtggaagttgtggctagttattcagaagatctagctaaaataattgacaaaggtgaccacactaaacagtagattttctatgtagatggaacagccttatattggaataagacaccatctaggacttccataacccaaaaggagaggtcaatatctggcttcaaagcttcaatgaacaggctgactctcttgttaggctctgaatgcagtcagagactttaagttgaagccaatgctcatttgatatctgaaaatcctagggcccttaataattatactaaatctacactgtctgtgctctataagtggaacaacaaagcctggatgtcagtatatctgtttacagcatggtttactgaatattttaagcacactgttgagatctactgcacaaaaacaaatattcctgtaaaaatattactgccattgacaatgcatctggtgacccaagagttctgatgaagacgtacaaggagattgatgttttcatgcctgctaacacaacaatcattctgcagcccatgaatcaaagagtaattgtgactttcaattattattatttaagaaattcatttcatgaggctatagctgccacagatagtgattagtgattcctctcatgaatttgggcaaagtaaattgaaaatcaccattctagatataattaagaacatctgtgattcataggaagcagtcaaaatgttaatattaacagaggtttggaagaagttgattccaaccctcatgggtgactgtgagggtttcaagacttcaatgaggaatgtaactgcagatgtggtagaaatagcaagagaactacatttagaagtggagcttgaaatgacatctttctaaggtttaagaagaatcataaagttacttcactgtagttctcacattgactgaattgctgcaatctcatgatataatcttaacagatgaggggttgttttttatagatgagcaaataaagtgacttctttttgtttgtttttttttttgagacggagtctcgctctgtcacccaggctggagtgcagtggcgcgatcttggctcactgcaagctccacctcccaggttcatgccattctcctgcctcagcctcccgagtagctgggactacaggcgcccgccaccacgcctggctaattttttgtattttttagtagagacggggtttcgctgtgttagccaggatggtcttgatctcctgacctcatgatccgccctccttggcctctcaaagtgcgggattacaggcttgagccaccacgcctggccaaagtagattcttgagacagaatctactcctagcaaagacactgttgaaatgacaacaaaggattgagaatattccataaacttagtcaatagagtagcagcatggtttgagaggactgactccaattttgaaagaagtactactgtgggtaaaatgcagtcaaacagcatcgcatgccacaaataaatctttcatgaaaacaagagtcaatcactgcagcaaacttcagtgttgtcttattttaagaaatcaccaaagccactccaactttcagcaactaccaccctcctcagtcagaagccatcaacactgaggcaagaccctccaccagcaaaaagattataactggatgaaggttcagatgatcattaacattttttagcaatgaagtatttctaattaacgtataaacattgttttatttagaagtaatgcaaatgcacatttaatagactacagtatagtgtaacaataacttttatatgcactgaggaaccaagaaatttctgcgactcactttattgtgacatttgctttattgtggtggtctggaatcaaacccacaatatctccaaagtatgactgtatttgtcatgattctgagagctggccagatagttctaacctgagcttgctcaagtggctgcattcagctccaagttttctgaggcctgggctcagctgggacacctgggcctttgtcttcatggtctttcatctcagacttctttatggtatgatctccaggttccaagagaataaaacagaagctacaaggactcttgaggcctagactccggaagcattactcctgccacacgctttggccaaaggaagccccaaagtgagactggtctcagggatagggaaaaatgcctcatctcttgatattttttgcaaaaaaattgtggctacatttaatctaccacactaatattaacagcataattgcagtttgcatgaccaaagtcattatttttatcagtgtattttgccctgttttccagtatctggtggtccctgggccatagtagacctggctcaataaatacgtgttgaatgaatgaataaatggctccactccgcctggcagcctctttactctaactgccttgacatctcagatcttcaaatgtcatcaactccagttcagctagcccttgagggccactgccccagatccaagttcaagagtatggctgagttgggctctggtggggagatcatgggaggtagtttccatagaactcatcactgcttgctctccttcccaacctaacttcacatgagatcttgaaagcagggaactttctctctgagtcagacctgtcgagcagaagaagttagagagatttgagtgatagaggaactcaatgtactgttgtcagagggagtaatatagaaagcatgagaaaaaaccagaagcctccaggagcaaagcccagctcccagctgacaacctcaagaaaatgaggacctcagttctacaactgcaaggaactgaatttggccaacaacctaaaggagctcagaaacattctttcccaggacctccaggaaggaatgcagccccgcccgcaccgtgatttcagcatcctgaaacccttactggaggagctggtggagctcatccagacttctgacctacagaaactgagataacaaatgtgtattgttttaagttgctaagtttatggtgattggttatataacaatagaaaagtaatacaatcaccatcacactaccatcaccactaccaccaaattattatcacccaataccatgactgtcactcccacccattcctgtctccatgttcctcaccagtatcaagactactgccatcataagaatgatacggtggactctggggactcggggaaaaggctgggagggtgtcaagggataaaagactacacattgggtactgtgtacactgcttgggtgacgggtgcaccaaaatctcagaaatcagcactaaagaacttactcatgtaaccaaacaccacctgctctctagaaacctattgaaataacaaacaaattaaaaaaaaaaaatagactactgccatcactccctaccaccatcactcagggccctgcaatcttgcataagtactagacttcaatctctctggaaaagtctatatggcccctgccctggatctgcctctagcattatctggccgatacctgccttggactcttgcccaccagttatcaggtctggcccctcaacctaattctcatcagttccttttccctagggcagggctctggaatctcagcccccaggcctgagtttagtcttgccagtgactggtcaggtcttttggaatctacagacccagtgtccacctgagggaggaaactcttgttcccttgaagttcctgctatttctgtcatctctctcccccttcctctaaacatggatcagatccctacagagttagcagatgagatcagcgttgagtttgccacaccttagagcagagattcacagtgttaggtcacatagggacatcttaaaaatactgatgcccagacccagtctcagaaattataactcaactgaccggggatggagccaggggcttttttttgttgttggttttgtgttttgttttgttttttttttttttttttgagacagagtctagctctgtcacccgggctggagtgcagtggtgcaatctcggctcactgcaaactccacctcctgggctcacgccattctcttgtctcagcctcccgagtagctgggactataggtgcccgccaccacgcctggctaattttttgtatttttagtagagacggggtttcaccatgttagccaggatggtctcgatctcctgaccttgtgatccgcccacctcggccttccaaagtggggggttggtatttttaaaagtactccaggtgatttttatgtgcagccaggattaagcaccacttccctggggctttattactaagactcctctctacctctggtcagtttctgctgtgcctaaccctaaactgattttgattgctttgtctgcacttgcagttcccagcattctgtccaagttcacccaaaacattaatgacaccagacttgcttcctaattcccctctatctctggctgttcccagggtacggttttggacacaaatttcctgcacttaggtatctcctcccatcccacctatacaacctgctcagagttaacctttacttatcctacataaaatattactaggaagtaagatgggcaatcactgagtatccacccttgaaattctctatatctcttaatagctaccacttaattagtatctgctatgtgccaagaactatgctagacacttcaactgtgtaacccaaatataatctagagctcccacagtctggtcttcatgcaatttcccatgaaaaaaaaaaacaaaaaaaaaaacaaaaaaacagcccagtagccaatagaatataaaagcaattgtgatttttactgatcttttggcatgaagaagtggttcattaataagccatagcaacccttgttaactcttctttttacattcctcttgccctcatagctttcctgcagctcctctgatatgatttgaatttgcgtccaggtccaaatctcatgtcaaattgtaatccccagtgttggaggagggtcctggtgggaggtgactggatcatgggggctcttcttatgatagtgagtgagttctcatgatatctggttgtttaaaagtgtgtggcacctcccctttctctctcttattccttctctggccacgtaagacatgtctgctccccctttgccttctgccatgcttgtaagttccctgaggactcatccaccatgcttcctgtacagcctgtggaactgagagtcaattaaacctcttttctttataaattacccagtctcatgtagttctttacacaatgtgagaatgaactaatacaccctctattcatgccccaaatcaactcctcatcccaaagtttatctcctaactcactgacctttctctttcttctcctcttcctttccttctgcttctatttgtctctttcctaagtaattcttggctctttaggatacaaatccccatgatactttctgcagttctctgtttctctttctctctctctctctctgtcacaaacacacacacacacacacacacacacacttcagattttgattctgaactgctgcagaggctcacacactgatctggcagactttgctatcatttgaatgtgtcccctccaaaattcaggcattgccaatgtgacagtattaagaagtggggcctttcagagttgctttgtccatgagagcccctccctcatgatggaactaaggccctcgtaaaagaggcttcacacagcatttgcctcacttgcccttccaccttcctcaccatgtgaggacctccggaggtgcagcatcaaggtgccatcttggaagcagagagtagccctccccaggcaactgagtctgccagagccttgactttggacctcccagcctccagaactgtgagaaataaatttcggttctttataaattacccagtctcagatattttgttttagctgcacaaagggtctaagacagactccaaagacaagttctttactgggtaaatgtgggcagatggggtcacagtggatggaagactgcaaatacaatgtttgttataacttactgtatccctataacatacagatctaatctcattcaaccctatgaggcaggtgttactactctcattccacagataaagaaactttgacagagggaaactaatcaagtcatggaggcaggatttgaacccaggcctgtcttactcttaacctataaatcagccagctcctgaaagggctttatagaggggctcttgagaacctggactcagtgtatgaagagctggaagccacaagtatagacatccagccagattgggctgctcagcacccactggctgtctctctgacttcctggaagagctatcaagactccccttacagaaacagcctcttcatgttcccaacaatggctcttaatctcagcactacttagaaactaatgaggcagaaagggttaatttcagatcccccaacacatgcacaagtggatcttggagaatccctctctctgtagttacaaggaacctgtttttcccttctctttcttccttttaggcaaaccatgcactgggcggtggccccaggggaaggaagggtttcctgaagcatggtcactgtcgatagcattagcaactttgggctgttttctttccatttactttccctcctggcactaaaacctcattagagctctgacagaagagaaatggctggagtggagaaagaaactcttgcatttcccagaaattctgctctgggtttccattgcctgtttcctagcaggctggaccggcagtgaccccaagagacatgctcaaaacctggccagcgtggggaggggtgcagggcaggcctgaggcccaaccagacccatttagtccctctccatcctgcaggaactggatttcagagtccatttttttgtggtttaggatcatgtacacctggataggacagggtttacttgaatcctctcttggaagccatagtctgctgagcaaatgaatggtgtaaatgaggctggggagtgggggagtgtttaacctaattaagagaaactcttttctcaagcactttagcactttccctttgcactgtggagaatgactcactgaatgcagagctggccaacatggggcctcttggaggcccccagtggacagcactttgttgtcactacagaagtccctgtgatcacataaaggaagcaacactgctcaggggaaatctcctgatcaccttggcagaggctgagagaccagctcctagaccctgctctgcctcaagcagatctgaggctattgccttgttccttctgagcccctgagtctttgtctggaaggtatgaaagctagagagatttctgagattcactgctgcccttgctaacattcagtttttgtggcatcatagaacctttaaagaatcagattagttccatcaacatttactgagcacttgctgtgtgccaaaatggtgctgggtgtcagagatacccctataccttagaaagttgcaccccctcgtggagtggactgctcagtgtacacacttgttaccctgagtgaagcacttacacacaaaagcacccgaccttgcataaacattcaggaagatcctggacccactaagtcccacctagcacctcagatgaccaattcctggtttagattacctcaaaggttttctcaaaggttataatgacttatatttcagaaaaatgtggtttttttgcattaaattttccttatttcccactgttaattgtaaataagacagcacaaagccaatgtaatagcaggttaggatcggattttagttttaggtctgacttactaatcctttagccatggggccttgagccaaccacttaaactctctaagcctcagtttccttatcaacaaaagagggataaaatactgccctcatgcatcatgcatgtcaataaaaggtcatgagaatctagtgagactacatattcaaaagggcttctgagagtataaaaatcaagaatgattataaaatgctgatgctgtccttaccaggattgtgtctttatcatagcagctgtgcaactttgtctaagaagcttcacatctcaggctcctttttctcatctgtgaaatgggtatggtgggtttaatctcacagaattcagagggctggagatagcctacgcaaaggttaacttttaagggctcagtgcactgaaaggacttacagaacctgcaactgcttgatgctacggttgtgcaattattggatttggagtcttgcaataagtttgctggtattttttgcagagactgtggaaagcagtccttctttctcagccaccttcacccctggaatctatgtcaaggtgtgtattcccaacagcagtatgcctgccctgaagtcttaatgagaatgaggagccctgcagcagctagaaggtgcagccgctagccatgcatgaagttaatttagcttctgtaaatgtctggcggcttaggtagcaagagacaggcctggcctgcatagatgatccgtgctctgccttggaaatgatggaggagaaacagctctcccaaaccgatgagtttcattcctaaagtgactgcaccataacctggggagactgggcttgttttcatcttaagctgaaaaggtttccaaaaacaatcatttcattgtttttctactcactgctaactcaataaaagtggttcttttaattaatttcattgttcctcattgtgctgtttttgaactaataaaaacgttctttctgctctctccatggctcttgcagcctccagccatttcccagcattcatcaactccccaaatgccaaaggtggatgggatgtcagaccatttaagccaattcacctcattttgcagatgagaaaactgaggcccagagagggatagtgacctattcaaggcatacactgaattagtggccaagttgggattcaaacccacttgggaaaggctcggccatgcagctaacatctgacagtttttgcacagactgcgttagaacctttcagcaactcctttctttctattgattttttctcataaaatcaaagcagtagatagttgtaaaaagaaaattggcctccagatttaacaaaattacccaggaatgtggcaatccacaccaaatacctgtttaaagagaaaacaaaaacactccaatgaaatattagtaagaattctgaaaatattaacaatgcctgatgctaacaatgataaagtaaaaataagaaaggtgataaatgtagttcaataccccaaaaaagtggcaatttaataatctgctcactgggtttcccaagttccttccactggcaaagatgtattccttggagaactaggaatcagcagagtttacccccacctgaaaatatctcagtacctccaagtttccacctgaaagagttatttgaagcattctctacttttgcaatcatttaagttcgctgacatctttctaaatatccttcctggttacacggccatgggcttttatgtcatcacgggtcagacttgtgttaaggagggatgctgcccccctataaccatttagttgccacctctttgaaaaaaaaatcctgatttctagagtcacaagttatcttttgctccccaaaccaacctgagcactttattcaaaactctctagaggccctaagaagtagttgcatactatttcagttcagatacaacttcttttgtacactgctagttcccttaggactgaggccgagcctgatttctgcttaaaggggatgacagaaaaagtgtaggatctagagatagaagtcatgagtttgagccctagctctgtcgttagcacaccctccattgtcactgatgtgtctgtgtctttatcatccctctcctacactgcaaggcaagaatcatcttcctctcactcactgctatatctctaggacctagaacggtgctttattcctagcaggctcacagtaggtttttattgattggatttttgaaaggaggtacagatttgggccatgacattgtgtcagatctttacctatgaagtgggaataacgatatgcattattttatatccacaagaccattcaatcttacagacagcccagggcagcaggtattgttatcatattccacatatatgaggaaaatgaggttcagaggtgagttttcacagcttgaaaagaatggagcagaatatagtacgtaggtaatcaataccaaatttggtgtacctgtagatgttatctttcaaaatggaagaaagcccccatgatacaatccattgccccccagccttagaagcagagatattttagtttgtgagagctccattaggtatggaaatgcataacccacttcacctccatggaggtcggtgctggaccccagtcctgctcattaggaggaacaaagagttcttgctgcaaattaaagagaatctcctttctttgcaattcctaacatgtgcttcttggagaggctgtgcttttagacaaacactttgagaacctatattgtcctaggaactatattagttgctatggttgacacaaacctgagctccacactcaaatgagtgtgtagtctggttggtgtaggaaggcattatgctcgagtcaaccttgcttcatacacattcacttccagctatgaatttactcttttaataatgcatggatgctatctcatttacatactccgctaggatcattatttcaccagcagccattcaccacagtttcacaagaggacatatctggagtcataaaatattggaagaaatttcggagcagataagaactgactcccacaggtgttcctggagatgagcacagatcctcagagaatacatgaaatcctctcctcacagagaagcgatttcctgctcctctcactgttgctgccctggcctcatcaaatgcagacagcaagtcctcttcttggattgaatctttctggttccatctcctaccagtccccccatctctcattcagctctggctgcccagctctcatggctgttccttgaacatatctgggtctctcttaccccagggactttgcataggcttttctcattgcctggaatactcttctttagatagccttgtagctccatcaacttctcaaagacttgaagtctttgacttcgttcaaacgaagtcttccttgatcatccccctcctacctcccccacaacaccaattagttacaatttaaactattcctcgctatgtggcattctcaatccattcctttactttatttgttttcatacaactcttccccatcttataaattatatattctacttgtctatctttcttgtctacattctaggaagtagataggctctgtgaagataaggatttttgtctgttttctctattactgtcatccagtgtcaagaaatgtgcctggcacaaagtagacattcaataaatgaatgaatgaatgccctgaggaatgtctcacagtgctaaaaccaaaaaaaaaaaaaaaaaaatagtaaaatttaaaaaaagactctcactaccttctaagtgggtacagcccttcatagtttctgaaacatatttgcatgaataatctcacttaatctccttgtattggactgaattctactctcccaaaattcatatgttgaagccctaacccccaatatgactgtagtatttggagataggatctttggaagacaattgaggttaaatgaggtcataccagtaaggctccaatctgataagactgtagccttttaagaagagaaaaagaaagatgtatttttctctctgtctgcactgtgaggacacagtgagaaagcagctatctgcaagtcaggaagagagccttcaccagaaaattgaatctgctggcaccttgattttggacttacagcctctagaactgtgagaaataagtttttgttgtttaagccacctgtctatggtattttgtgatggcagcctgagcagactgagacaccccacaaaatagaccctgcctggcagatttgatcaccccattttcaagacacaacagcaaaggcccagaggaattgaattcacataagtagtaataagtctgccctgattccactgaaccaggctaacacagagcatggtcaacctccaaagcctgaatcccacacaattggctcttcccttcacaactaccccctactactagtgtccatttgcaaagggcctacaagaaaatacagcatttttcaaacacatccttcaaggagtgaaagttatgagggtttctagtgaatgtgttgcatataagcccaagaaagagtgcacactttaattgaagagcaaagatttcatgcacttctgccctgctcctcacagtctatacccttccagcaccactttcagttttctagaaatccacccatactttcattgatccataatccatccattcgaaatttttgagggcctactatctgaattaacaccatccgaatgtttgaggagaagccaagatggctgaataggaacagctccggtctacagctcccagcttgagcaacgcagaagatgggtgatttctgcatttccaactgaggtaccaggttcatctcactggggagtgccagagagtaggtgcaggacagtaggtgcagtgcaccgtgcgcgagctgaagtagggcgaggcatcgcctcacctgggaagctcaaggggtcagggaatttcctttcctactcaaagaaaggggtgatagacagcacctggaaaatcgggtcactcccaccctaatactgcgcttttccaatgggcttaaacaacggcacaccaggagattatatcaagcacctggcttggagggtcctatgcccacggagtcttgctcattgctagcacagcagtccgagatcaaactgcaaggcagcagagaggctgggggaggggcacccgcaattgcccagttagttgtttgattaggtaaacaaagaggccaggaagctcgaactgggtggagcccaccacagctcaaggaggcctgcctgcctctgtaggctccacctctgggtgcagggcacagacaaacaaaaagacagcaataacctctgcagaattaaatgtccctctctgacagctttgaagagagtagtggttctcccagcacacagctggagatctgagatcgggcagactgcctcctcaagtgggtccctgacccctgagcagcctaactgggaggcaccccccagtaggggcagactgacaattcacatggccgggtactcctctgagacaaaacttccagaggaacgatcaggcagcagcatttgcggttcaccaatatctgctgttcttcagccaccgctgtggatacccaggcaaacagggtctggagtggacctctagcaaactccaacagacctgcagctgagggtcctatctgttagaaggaaaactaacaaacaggaaggacatccacaccaaaaacccatctgtacctcaccatcatcaaagaccaaaggtagataaaaccacaaagatgggaaaaaaacggaggagaaaaactggaaactgtaaaaatcagagcgcctctcctcctccaaaggaatgcagctcctcaccagcaatggaacaaagctgcatggacaatgactttgacgagttgagagaagaaggcttcagatgatcaaactactccaagctacaggaggaaattcgaaccaatggcaaagaagttaaaagctttgaaaaaaaattagacaaatggataactagaataaccaatggagaaaagtccttaagggacctaatggagctgaaaaccaaggcacgagagctacgtgacgaatgcagaagcctcagtagccaatgcgatcaactggaagaaagggtatcagtgatggaagatgaaatgaatgaaatgaagcgagaagagaagtttagagaaaaaagaataaaaagaaacaaacaaagcctccaagacttatggcagtatgtggaaagaccaaatctacgtctgattgatttacctgaaagtgacggggagaatggaaccaagttggaaaacactctgcaggatattatccaggagaacttccccaatctagcaaggcagaccaacattcaaattcaggaaatacagagaatgccacaaagatactcctcgagaagagcaactccaagacacataattgtcagatgaaccaaagttggaatgaaggaaaaaatgatcagggtagccagagagaaaggtcaggttacccacaaagggaaacccatcagactaacagctgatctcttggcagaaactctacaagccagaagagagtgggggccaatattcaacattcttaaagaaaagaattttcaacccagaatttcatatccagccaaactaagcttcataagtgaaggagaaataaaatactttacagacaagcaaatgctgagagattttgtcaccaccaggcctgccctacaagagctcctgaaggaagcactaaacatggaaaggaacaaccagtaccagctgctgcaaaaacatgccaaattgtaaaaaccatcaaggctaggaagaaactgcatcaactaatgagcaaaataaccagctaacatcattatgacaagatcaaattcacacataacaatattaactttaaatgtaaatgggctaaattctccaattaaaagacacagactggcaaattggataaagagtcaagacccatcagtgtgctgtattcaggaaacccatctcacatgcagagacacacataggctcaaaataaagggatggaggaagatctaccaagcaaatggaaaacaaaaaaaggcagggattgcaatcctagtcactgataaaacagactttaaaccaacaaagatcaaaagagacaaagaaggccattacataaagggaaagggatcaatgcaacaagaagagctaactatcctaaatatatatgcgcccagtacaggagtacccagattcataaagtaagtccttaatgacctacaaaaagacttaagactcccacacaataataatgggagactttaacaccccactgtcaacattagacagataaacaagacagaaagttaacaaggatatccaggaattgaactcagctctgcaccaagcggaccttgtagacatctacagaactctccaccccaaatcaacagaatatacattcttttcagtaccacaccacacctattccaaaattgaccacatagatggaagtaaagcactcctcagcaaatgtaaaagaacagaaattataacaaactgtctctcagaccacagtgcaagcaaactagaactcaggattaagaaactcactcaaaaccactcaactacatggaaactgaacaaccttctcctgaatgactacttggtgcacatcaaaatgaaggcagaaataaagatgttctttgaaaccaacgagaacaaaaacacaacataccagaatctctgggacacattcaaagcagtgtgtagagggaaatttatagcactaaatgcccacaagagaaagcaggaaagatataaaattgacatcctaacaccacaattaaaagaattagaaaagcaagagcaaacacattcaaaagctagcagaaggcaaaaaataactaagatcagagcagaactgaaggaaatagagacacaaaaaacccttcaaaaaattaatgaatccgggagttgctttttgaaaagatcaacgaaattgatagaccgttagcaagactaataaagaagaaaagagagaagaatcaaatagacgcaataaaaaatgatgaaggggctatcatcaccgatcccacagaaatacaaactaccatcagagaatactacaaacacctctacacaaataaactagaaaatctagaagaaatggataaatttcttgacacatacatcctcccaagactaaaccaggaagttgaatctctgaatagaccaatcacaggctctcaaattgaggcaataatcaatagcttaccaaccaaaaaaagtccaggaccagatggattcacagccgaattctaccagaggtacaaagaggagctgatatcactccttctgaaattattccaatcaatagtaaaagagggaatcctccctaactcattttatgaggccagcatcatcctgataccaaagcctggcagagacacaaccaaaaaagagaattttagaccaatatccttgataaacatcaatacaaaaattctcaataaaatactggcaaaccgaatccagcagcacatcaaaaagcttatccaccatgatcaagtgggcttcatccctggaatgcaaggctggttcaacatatgcaaatcaataaatgtaatccagcatataaacagaaccaaagacaaaaaccacatgattatctcaatagatgcagaaaaagcctttgacaaaattcaacaacccttcatgctaaaaactctcaataaattaggtattgataggacgtatctcaaaataataagagctatctatgacaaacccacaaccaatatcatactgaatgggcaaaaactcgaagcattccctttgaaaacaggcacaagacagggatgccctctctcaccattcctattcaacatagtcttggaaattctggccagggcaatcaggcaggagaaggaaataaagggtattcaattaggaaaagaggaagtcaaattgtccctgtttgcagatgacatgattgtatatctagaaaaccccatcgtctcagcccaaaatctcctcaggctgataagcaacttcagcaaagtctcaggatacaaaatcaatgtacaaaagtcacaagcattcttatacaccaataacagacaaacagagagccaaatcatgagtgaactcccattcacaattgcttcaaagagaataaaatacctaggaatccaacttataagggatgtgaaggacctcttcaaggagaactacaaaccactgctcaatgaaataaaagaggacacaaacaaatggaagaacattccatgcttatggataggaagaatcaatatcatgaaaatggccatactgcccaaggtaatttatagattcaatgccatccccatcaagctaccaatgactttcttcacagaattggaaaaaactactttaaagttcatatggaaccaaaaaagagcctgcatcgccaagtcaatcctaagccaaaagaaagctggaggcatcacgctacctgacttcaaactatactacaagtctacagtaaccaaaacagcatggtactggtaccaaaacagagatatagatcaatggaacagaacagagccctcagaaataatgctgcatatctacaactatctcatctttgacaaacctgacagaaacaagcaatggggaaaggattccctatttaataaatggtgctgggaaaactggctagccatatgtggaaaactggctagccacatgtagaaagctgaaactggattccttccttacaccttatacaaaaatcaattcaagatggattaaagacttaaacgttagacctaaaaccataaaaaccctagaagaaaacctcagcattactattcaggacataggcatgggcaaggacttcatgtctaaaacaccaaaagcaatggcaacaaaagccaaaattgacaaatgggatctaattaaactaaagagcttctgcacatcaaaagaaactaccatcggagtgaacaggcaacctacagaacaggaaaaaatttttgcaacctactcatctgacaaagggctaatatctagaatctacaatgaactcaaacaaatttacaagaaaaaaacaaacaaccccatcaaaaagtgggcaaaggatatgaacagacacttctcaaaagaagacatttatgcagccaaaacacacgtgaaaaaatgctcaccatcactggccatcagagaaatgcaaatcaaaaccacaatgagataccatctcacaccagttagaatggcaatcattaaaaagtcaggaaacaacaggtgctggagaggatgtggagaaataggaacacttttacactgttggtgggactgtaaactagttcaaccattgtggaagtcagtgtcacgattcctcagagatcttgaactagaaataccatttgacccagccatcccataatccaaaggattataaatcatgctgccataaagacacatgcacacatatgtttatatcgtcaatattcacaatagcaaagacttggaaccaacctaaatgtccaacaacgatagactggattaagaaaatgtggaacatacacaccatggaatactatgcagccataaaaaatgatgagttcatgtcctttgtagggacatcaatgaaactggaaaccatcattctcagcaagctatcgcaaggacaaaaaaccaaacatcgcatgttctcactcatagatgggaattgaacaatgagaacacatggacacaggaaggagaacatcacactctggggactgttgtggggtggggggaggggggagggatagcattaggagatatacctaatgttaaatgacgagttaatgggtgcagcacaccaacatggcacatgtatacatatgtaacaaacctgcacgttgtgcacacgtaccctaaaacttaaagtataataataataaaataaaataaaataaaaaataaaaatataaaaaaagcaccatccatgcaaattttattccatcacagagattaatgaaaagaaatggtcctactagcattttatcaagggctacttgtggactgtatactatattgatactttgaatttgttttttttttttttttttttttttgcatggacagatgaacctttatttaaaaaaatagcacttcaaataaattaaaagggacaaccgtcaagtgttcaaattgtgaagaaatagttgaaaacctagagggactccaagctgcagtcttctaacctcattctttgtccaatggcaaaaacccacacatctcagtattcccactcaattttttccctactgagatgagggaagcaattgcaaacaggagaccagacgaaggagaaagctgcatctgattggaatgaacattgccacgtacttgctaatacgggtttcactttatgaccaaatgtattctttcaaaaataaaaaagaggagagggaagctgcatgtttttaaaaattgaaattatttagggaaaaaacactaactctagtgcctttaacgggcaatagcaacttttttcctccgaagtcaaacaccatccccagctgagcctttgtgctacaagcttttcaggagatgttacctaaactttattaaaagaaaagaacaagtttaaatacagacactggactagcccagtctgtattttcaagtccacattcttcatctgaatcagggacccccctgagtctgcatgttttcaagttcacagtacatggaaccagtttttccttttaattttttcctcactcagagcagccacacacagtggccgttgacgctggaacctcgggcggggccttttcctacaaggcctggccggagctgcccaaggtttctcctcaatgagaatcgatgctgtcatgctctatggatgggaaaaaagcaagaaaatagaagcacctggtacaggtttcatcagatccattcggattcgctatgttccaaacccgctgctgaacgccatttgtccactttgtgtgtgttgaacagtttgtggccttggagtcagtctcaattagaagaactgttattggacgccccagaggttgatgcaatagcagctccagcagggctactcgtagagactgacttttggatgtgaggcaacaagtagggatcacaggccagctgctggacatcaatgcggtcctcctttcggtaggccaagcatcgtcgaatcaacgcctttgcttcaggtgttactaccggctttggcgggaactgcacttcagtagctttaagaatcgtattctcttgtaggatgtcttgctgagactggttatggccaaaaggcttccttccataaagacactgatagaagatcacacccaccgaccacacatcaactttatttgagatctttggtggttctttcccaaccacaaaacactctggtggtaaataccaataagtaccagcaccttgtgatgttagctccatgccatccactgaattgtagctatcatcatccatgatcttcgaaagaccaaaatctgtaatttttatctctccacaccctgtaccattttctaaaagaatattacctggtttgaggtcatagtgtatgatgggaggttttatttcatttaagtactttaaagcattcacaatctgcatgataatggaccgggcctctttctctgacattaatttgtgctgtttcaggtagaagtccagatcatttccctcacagtattctaatactgtacaaaacgagtcagtatccagtgaaaagtaatcatacagcttaactattctgggatggtccagctctttatgaatccggtattccctacatgcatgcttgtggtaattctcctttttctcatctctccagtttttatttaactggtgaattttcacagctacgtatctttgctctgttagatcaaatgccttgtaaacttcactgaaacctcctctacccaaaagatgtaacaacaaatatctgtcatttagcgttggatgatatttaaattgtgaattatcttcattatgtatcctttttacttccctgatatgtagttttctaaccctttctagcctctccagctctgcctggatctctgcttcctcctttttaagatgacctaatctgagtttgaagatttcttcttgttcatggtattcttttaacgttaacgtttcattttcagctccattggtcttgcttttccactgtttctgctcattggttgcaggaggggcctgacccatggcaggaggtttccgctttgctaacattttccgttgtctttctatctcttccctctgtgaatttatcctttcctgttgcttgataagattctgaaaagcataaccatctgtccactgctcagtaaatttggctccgtgtcggacgtagtaaagtagcccagtctcaagcggtcttgcatgctcttatctctacacgccatcttctcttgttttgacttttctataaggagtttcttgctcattgtcacacatctatttaatcgttccttgtatttctctagcatcttttgctgttcatcaatctgccgtctcaaatcacagatggctcttaataaatcatctattcttccctccttcttctctaagtcagaattcttactgttttctagtgcagatattttttctattgtgaggtcggactgggtctgtctgtgctggatggagatctgtttttgggagctgcaggaatgctctgtgttgccagatcccgtagatgagggactgttttgctgagctgaaacaaaagtgaagcagaggccagctcccctttgcgccagctgctctgtgtcaagccgaggttttgctagcatcactgacatgagggttggcagagcagactgctcctccgttgcctcctttgcagcactgccatctaaaccatagaggggctgttctactcgtcgcggtaagggattggataaggaatgttgcagtgaggatcgtgcaactggtggaacacttctgccagggctggttcccggcccgcttcccccagcaaactcaaagtaatcactaattttatgtcccctaggagtgcctttcccttggctactttcatatggttcagcttttcttttccgatttcgctggtcattctgctttttcttgggagtctctacttctttatcactcaaggatccgacgctgcacaagctctggttggaagactcactattaagtggtcccttactaacacctactccagtaaacctggcctccaataatttctgccgtcgtgggtccaggctatgcaattcttccatcatttctactgccgccgccgccgctgccgctccacgctcctccctggagggaccccgacccgacccggctgcggaccgctccgctctccccctgggcaggcccggggcggagccggggcctctcctgagcgccgcaaccccccgcccgggcagccaccgccggcgccgggctccacgagagggcgggcgggggagggggggcacgaaggccgcagatccccgggctcgcgtacagagccaggcgcccgacgcggccccgggcccgggcggccacgggaccggcctcctggcgccggacaaaggccaagggaggcgcaggagggcccaggccaggtcaggaggtgggggcccgctcggctgggggccactcgggtgcggcgcggagggcgggggtgtcggaaccgctggtgcccaggacctgcctccggccccttaatccggatcggttcggtccggattagtagtgatcggtgtaaacacactagtgaaaccgcgtgtttcctcgcgagatttgcacggctgggaggcagggggggtcctggggggtgggggaagcgccgacagtgggggaggagggggaggggacgaggaaggtggggggggtccccgctgccccctgaatttgtttattcacttaatcatcctgccaattttatatgggaaccatctacctattacagaggcagaaagtaagggttagacagggtagggtgacttgcacaagctaacagtgctgccaggtgagagagtcatcattgttgggcttcacagcctgagtcctcttcattgcatggtgctgcaggtgacagccatgggcctggaactgcttcaagggtagtttccagtgtcctcacctctccccttccccagcctcacctctcacatttccagaattagccagttcctattattactgaagcaatagttaagtttgagggaaaaacaccaaatataactacagtaacaaaatataataagagttaacatcattaactagtcatcatgcaattgccacaactatcctaggaggaagctattaccgttttgatcattttacaaatgatggaacagagtatcagggagattaagtaatttgcacagggacacacaaccactccaagaaaagatggagatccaaatgttgctcttttcaagaggcagctcagcttaatggggaagtgggaaagcatatatctcaacaaggagaaataccaaatgggtctaccatatgcaaagcacagtgctatgctctggagggggatgcaaaaatgagtaaaggagcatatggttctctgctgagaaagagaaggctctcacaacacaagagttgaacttgggcaaaagacagtagggttccacattaccgatgtgactactggaaattctttcccaactatcctgggtcggaggcagaagaagagactggttggagagcccaggagagcctctgaacattaagccaacagtcttgaatcatgacaagagcctctccacagagtcctcaaatgcacttctattcaatcactcagatttttcttctttgagcatctaagaggcaatatgatcaaagggagacaaggtcgtgaaatagaaagaatgataactttgacatcaaacttgttataaactccacctccccttattataagctccgagaccttgggaaattgcatatttccctgaggctcacttccctagctgtcacttgtggatattaactcctcatatggtgtcagagaagtaaatactataacaaatgtagaaatacatagcacacactaaccctcaaaccaagttagttcttcccccctctcagtggggctaacacttggtgtgaggtgctggcaaagaaacaaagacttttaatgcttgttatcgctttctagaagcttagaatttagttgggattcaggagacagggactagcagaagaaaacacatactgcaatctcctaagtagtctttcacctttaatattcctccctctgatccatcctgtggagtaccctttagtaacacaaacctgatcatgtcccttatgaccaaggaattattctgctaggcatatccccaacagaaatatgtccatatgttcatcaaaagacaggaaaatttgctcaacatcattctcattagagaattgtaggacaaactcacacgaagattccactgcacacttactagaatgttttaaatccagaggacaagcttttgataagtatgtagagcactataatcctcatatgctgctggtgggaatataaaatggtacaaccactttggaatccaatttagcagtttcttaaaaatgtaaacaaccacttattatatgacacagccctttcacctcacatatttacctaataaaaatggaagcatatgtccccccaaaacttatatatgaatatttaaaacagctttatgtgtaataacccacaactggtaacaacccaaacatccatcaacatgtgaatgataaacaatagaatactactcaacaataaaaaagaacaaataattacatacataaacaggaataaatttcaaaagtaattatcccgagtaaaagaatccagtctaaaaacagcacacgttgtatgattccatccacataatattctagaaaatgcaaattagtatctagtaagggaaatccaatcagtggaaggctggagacagtggtaaggtgtgggaaggacaggagggaggaatgacaaaaggacagaagaaaacattgatggggactatgaatttgttctctatcttgattgctgtgatggtttcatccatatatatccgaacttatcaaattgtataatttgggatagcacttggtttgagctgttgcggagaaagagttttagtactttttattgctttttaggaacttataatttagttgagatttagtttattagcaatttatgccaattataatacaataaagctattttaaggacatgcattggaatgtttacaacagctttattcataatagcctcgaactagaaacagtataaatgttcttcaacagtaaaataaataaatgttgatttatatatttgcagaatactatatagcaatgacaataaacaaactgcagttacatacagcaacatggatgattgtcacaaacataaagctgagcaaaataagttagacacaaaagaatacatagtgcatgattttacatgcagaaggatgaaaatatacatgaaataaacccatggtgttagaaattaagagagcattgacttttagggaagaaggaagggcatggtggcagggtaggatgggagctccagggatgctggtgatgcggtattccctggttctggtgattcatttatggtggtatcctcttatcataatgcactaaactgtaaacttgtgaattttctatttttctatatgtatgctgtgctttagtaaataggtttattttttaaaggttattacatggtatgtgataaaaggcagcattgattgtggctaaacaaatgccttaaatggaggggggatgggaagcagtaacattattaggaggaagagcaaaagaggtctaaggctgtgtagccaggagtagatgcctaggcacttttggtttgacagacatttttctattcctacaatgcaaaatgatttcaaatatataaattttaaaaccttccatttgtttagtgctttagaatttatagtttgcatggtcacaattctgcaaggataagaactctgttaatccatgcagaaagtagacattcagcaaatgtttacttgagtgaatttaaaacacttttaccttcactaatttaatgatttctcacaagtgttctgtagatgagcagggtgagggttattagtttcttttcatagaggggaaaaccaaagcccctaggagctgaggcctcctgcagatgggggcaatggactgggtgtgttttgaatcctggctggtggcctttgagctctgtgaccttggacagggctggaaccaagagtgcaattccctgccttcagctgcagtctccctccctggcccagtcatgaaagcaaaaatgggtcaagttctaattccctgatggagaggcacacaatacaaaattggtgacctttactattccaaaggcatgcataccctccctgttgaggacacacaaagatgcaacaaattatctttgtttttatggataaaacagctcatacaaaataaaagtgggccatacccttgaatcacacacacacacacacacacacacgcacgcacacacacacacacacaccaagaagaaggcctgaagggacagcagccaatccctttggaagaactgagggctgtgttgccagaggatgcccaggtagaagctaagtcatgctgtccctggtgaaaaattgcttagcgtaattatatccccagagaatgcaggcttccagatgggccccagagcatcctttacatacagtattttaggccaataacatgattctaatgaagtaggaaggaagaacaagaataataaaattaaaaagtcaaattttcatccttaatctcgagggctgcaaataggatgcggctgtggttcagaagcagagaacggagaggtgggggaagaagcccattttgaaagcggccaggcgttcctaaaatggtccatgacaagggtgaactttaatctcaatttctgcagcttgacccacatccccttggaggaggacagaacttttcaatgaggaggcacctagaggaggatcagaaaagtaaataccaaattcgtctgtttctccatctctcttccacttgagaagtcctcagaggatgtggcctttagtggacgtgtttgtctggagttgaaggaacggtgcctggggatgagtccaggagccctggttggagactttccagcaggcacatcctctcatctgcagtgtcctgctgatgaagacttcacattcctcttgggctgcccctcatcatcttggcatcccatggttcaaatgcctctggaagactattacttggagttactctgatttatttattcagcgtcttctctgagacacatactaagtgtccaaagatgaacaaaactgttttctgcctctgtcctcagtgagctcacagtcgaacacaggaagttggatgaggaaaatgattcctaggtgtggtgagtccttccatagagggacgtgcttaatgagaccaggggttgggaggaatgtggacgtggcaccatctaccctttccttccagatcctgagaacctgtgcaggcctgtgcctggcaccatcacagcaaacaatcctgcctagcatccaaaaagactccaccactcttcccctccatcccctcttctttaccaacacaggtagtaatattcccaaagcacatcctccccatccccatgtaaggcaaactaaaatactacccatgggcaatgtgagccagagttatgccagggaacaagacaagttccacagtagctacttctacacgaattaacactcttaaaagaagataattaaagctgtagtcttctttgaaactgggagcccctaatctctcttctacctgctgagactataccaggaattccacctttgggttcaatgattttcagtctttcccaagaagattaatggaaaaacttcaagaccactgaccaaggcctcaggaagtgtaggctgcatccccactgctactgtctgtctatatgactttcggcaagttactttccctgcatggacttctgtttagtcttctgcagaatgaagggattaaagagttgttttatgttcagaagaggtgaggccttaagggtcataaagtaacacatcgacaaagactagtttacctctggctgaaagcaaaattggtcctgcaggagagaagggcaggaagaagaaaactggggtagttcctacacaaacaaggtcactgacaatttcttataaccctgtatacagacaccattcctcgcattaaaagattaaatgagtctctttccctcaaaactaggctgccttgcaaattgctttgctcaatggaatatggaggtagtatcaccatgccagtttagagtatagggttttggggaccagaaaactcccacttttgccctcttggagtcctgcaccacaatgtcaagaggcctgaccaccctgctagagagaccaaatggggtgccagagatgcctttttagtttcccactgtttcagccatctctctgctggggcatcaagcatgtgaatgaaaccatattgaattttcagccctagttgagctccagatgtttacagtcacatgaccaggtaagatgagcagaagaactttccagctgagccctaaccaatttaccaatttgcgagcaaataaatagttgttatgttgagccactaagtgtttggactggtttattacgaagcaacagataaccaaaacaggtgccagaggtaaatgttataagtgacaaccttacaaaggctggtgactatagttagaggtttggattagggttaggagctttgggttgtgcaatagtacttgagagaaattgatcattgaaaatttatttgttaaaaagacatttcattttcatgggatatgttgtcacaggaattaatcaatgctggctggccaagcccatgcagatgaccttctgccaaggactggaagccagcttggttccaaacatggaggaggtaagatttttatccataaattcccaacttatttccatgctgccctcctcccacaccagtacctaccccaactctcactcaaaggactagagatgaaaaaccatggaaacgaatggctttgtatagtactgaatgggaaacatagcagctgggacttagaaaagcaaaagctgttatgttgttaataacatttttatgggtgattttgttgtctttgattgtaaaagaagagtaatacaagctccagtttgttctttcaggcctggggggtaggcttcccttatagaactccctgtctgttagatttactcccagctgaaccacatataccttcaatcctctccctcccaatactaatcacaagagctaccaatttttgagaactctccatgccagccattgggctacagaacttatttatgctatctcatttagtccttaaaatgaacctttgaggacatactattcccatctttatagattagaaaactaaaggtcagaggtattcattaatgtcttatacctaataaatggtacagctgatatttaaagtgaggtctgcaaggccccaaagaccatgcacttaaccatttctccaaacagaatacagctcccattaccagggctacccattcacacatacatacgtgtatgtattcaacatattcatttattcaacatatatataatgagcacctactttgtgaagtaacaaatcatacattaatgaacaagacagatatcatctcaaccttcatgaagcctacagattcctaccgtgacattcaccataaaccctcatttcacaatgtcccaaaaccccctttcatattttaacctcccagcccttcatccctacttctagccatgattctaatattctataacatggctctgactttgatctttgctattcttaacatgatgtacacctttctccagaaaaaaaaaaaaaaaaaaaaaaaaagactggagtatattgattacaccaatgggccaaatttcccacccctgattatatccatgccctttgcggcatgactttgtggttctttccacaaagtgttggaatctttccattccctgaatctgggctgttctgctgacttgctgtgaccaatggaatgctgcagaagtgacaatgtgccagttctgagcctgtgtctcaagagctttgaatgcatgggctcactctctggtacctctgcctccactgtgagactgcagccctcataagtcagtcaatattctaggaactgaagataaacttgtaaaagaaacaagcatggtccccactcggacaaagtttacaccctagtaaatcaataaatcataaatgagaatcctggatttgccaggtcagaaggaaacattatacaacctcaaataatgcttaaactccacaccatatcctcaatagggctttggaccctttcaaaaacagggagctcattatgagctaacacaacagttccagtttttgatggaacactcttggagagatttttcttctagtgaacggaagcccatccattgggagtgtccacactttgatttatggatatttctcagggccacacacagcatgtctaactgcctgtgtgttctgagttctctcacttctaggatacatcttcttcattctcttagctatttctaaatgtcatgactttgagaccccttgccattctctctcctgaacatgctaccttatttttctacattcttctaaaatttggttcggagaaataaactcaaaacttaccaacttcttgtactacattcctcttggtgcttcagattccttcattttaaattaaagaagttgaactcggtagcttgcaaggaaagatagtagattgcaatggaatgaatcctagatgctcaacagcctctctctgctctgctttattttcagcactgctgctgaagctgcctatctgcctatcatctcccaaaccatctttacctgtaaagtcctattgtgcagtaaagagacttgaaatcagaagaactggttctgaatcccagttctggcactttacagctaaacgaccttggacatattacataactgctctatctcaatttctttatccataaatctagaccatcactcctttctttccagctcacaagaattgtgtaggttacaagagagggcatggcgtgctatgtgtgaacacagtcttccatcggatgttgtgcagataagagatggtatgttggtgctgtcgtgggaactatagaccagcaacatagtgaacaccattctatttatgaaatatatttattgattgacttgggggctctgcttctctgtgaaaattaaatatgattttaataattccagagaacagactgtgcggtaataatcgtccctcctgatgggtatatcatgttttgtgatgttctgaggtaagaatgacatttaggaatatgttgtggtgcccaggagcagtagctcacatctgtaatcccagtactttgggaggatgagagaagaggatcacttgagcccaggagttcaagactagccagggcaacatagactgtccctacaaaaaaattaaaaattagccaagtgtggcggtgcatgcctgtggtcccaggtgctgaggaggctaatgtgggaggatcacttgagcccaggagatcgaggccacagtgaaccatggattgtgtcactgcactcctcccttgggcaacagagcaagaccctgtctcaaaacaaacaaacaaacaaacaagaaatatgttgtaggcaatagtcctggaaggggaaactccaggatggtagaagagccctcctgagttgaactaaggtccaaatggcccaaggttctgtcttgtcccgttccaggaacaggctgcattccctgctgcacatctcacccttctcctgcccacccaccacactgctctcacattgtccttctctgcttccacctctccttggctccaaactcctccatgatcaagcccatcctccccagtggggctcatgaacaccttggtcactctggcttcccacctcccagtcagatccaatggtcatgcacttctaaactccatcctttatcaaaacccactgtaatatttcacatctgcatgatataaaacatgcagttcctttcaactcaaagtccctctctctgcctctattcatctgatcaattctacttaccctttgaaacttcaaaacccttcagagaatcttcctccgacaggaatcccaagctgataatctccagcaaacctgctccacggtggtaattactctctcctctgtgttcatgttggaccttcaataaaccctgtttctcacatattgaaattctctgtttacctgcctgactcctcaactgtgagagcagagttgagtccccaactatttctgagtctccagcaacaagcatggtttggcacatggaaaatgtttgaaacagattagaagaaggtatgagtatatcaaataagcaaagatactggaatgattttgcataacaatattatactctgatccccatcccaaaactgagcaccattatctttccacatgcctgaaccttgggaggcaaagaatagcccaagaagaaaacagagaaaatataacacagtccatcttctctcatgagacaagagtttatgattgccaggaaatgtgtaaattgcagcagagattatttgtcaccacttcgtgaaagggcagaaaacggagctattttttacaacttcaaaagcatgcacaggttggggctactgcagtggaaatgccaggtctgttatatgcagatacattgaggtggcaaaaagacctgcttctctggggggtggggaggggatgtgaaggctggcacggttactcataaagctgcctggctgcacaagattcttgaaaaatctcttcccacttaatcagaatatcagaatcacagaactcaaagatcagggtcctgtgaacatgttctgtattggagaatttctgtccgtttatggattttaatcctctaaaaactgatatctatttttagtttccatctcattaaatacaaaagaccttcattgaacatctactctgtgcttgatgaaaggaagaagcaactctgaatacatcacccgaacctcaagcagcttatagaccacataggagcatgtgtaagttgtgttcacaatcacacaaccactttaatgcagagcaaaagatgataaatgagaaattcaaaatgttgtgagcactcagaggaagacaaaaggagcactttggaaggatgaggccaagatgtggatggccagggtttcagctctagtacccagctcctcactatttccaggaaaggacagcctgcagatgcctgaatgcctgcatgaccacttcagatgaaatgggttgtgattgaggcttgcagataggtgtttatttccatgaatcaaacctgctctctctgctgctgatctggagaaagaaacacttccagacttaagattctttattgtgcaattgctttcctgcaactcttgggtgtaggttggtttgtccagaaatgccaaattccagagaacagcagagaaaaaagagtgattttgcttgatactagcaacatcacaactaatccctttctcaaacaagctcatggcagcaagcaaactggtgacgtgtgactcctctttaatcctcttagctcatctccctctagtgaatccaaatgttaccagtgccagggactagcatcctggagcagggctgtggtggaaaatgcacaggatctgttctcggaacacttgggtgggtccttagctctaccactttcagctgtgcacctttgggttagccgcaacctccctcagcctgcctcaattccctcacctgtaaaattggattggtgatctggggatcagagtagaaaatgtgtatgaaattgccttattaattgcaaagataagtcaggactatcagttattttcaaattgtgcatatccacccttcttaaaaggcctggtgcccttctgaatgggcatggaggttcatgcctcctttgcttttggatttcctcaacctcacacaaggtctgacatttaatgagcacctcagtgcattcttgttagattaataagtgaacaaattgcaacatgttaccctggaggttaaggcttctgtcttccttccaagctgaaaggtaaagagagaaaaattaatttacaaaatgtttggaatcatcagcatgaattctaaaataattagaattttctgaacacacacacacacacacacacacacacatacacacacacagagagagagagagagcgagagagcgagagagcgagagagtgagttttttccttctggtagctggaagtctacattaaatttgaagaacatcttgccctaaaatggtttggctcctggttatgtgaatatattttgcttagcactaagggaatagagatggattagtaggtcagatacttggttctcattcttgattgattcatccactctttcatccatccatccatccctccatccatccactcattcattcattcactcactggcaacaatttgttccaaagcactgactgtgtgaaagctcagcctcattacaagatgaaaaatgttggagcagcattttggctgacaaaccaccactgatccttccagaccttattgcccctgagccaagaaacatttgaaatcgtactactgcccccacatacggcatttagtgccacctcttatcttcagtttgatagtttcagggaccaaaatgctgagactttctccctttagataacattcctgtgactgggatatattgccaccggaatcctccaaaaatcccatctccgaaaagactgttcatggcaagtgggagtctacacggagaatggcgacgattactttggactgtagaacatgtgactggactgtatacatgctgcacttattgcctccccaccatccttccaccctctttctgtggctgtacccaacacaactgctctgtcttcctcatccctagtaaataaccctgcctatgaatctcactttttttttttttttgagatggagtttagctcttgttgcccaggctggagtgcaatggcgtgatcaaggctcactgcaacctctgcctcccgggttcaagcgattctgctgccttagtctcccaagtagctgggattacagatgcttgccatcatgcccagctattttttttgtatttttagtagagatgggatttcactatgttggccaggctggtctcaaactcctgacctcaggtgatccacccgcctcgccctcccaaagtgctggggttacaagtgtgagccaccatgcccagccaaatctcacttttccatccctcatcttttctcccttctccttccttccaccctcctttcctctgactattccaattttatacttagttctcatgcaccagacctaggcttggagggataaaatctcttctgcagtgcttgctgttccaagctgctcaccacatcctctgccctttattccactcccttcatgttccaaccactgatcaacccctaagaaaaaaaacaaaacatttccttcttatgctttatgcctccaaattttgttctccctgggttgctgcctctctctcaggctggcggctccattgttattatgatcgtatattaagtttaatgcgtccacaggcattttacacactcataaaagtcaggccctctaagagctccctgtgctgaagacactggaaatgctctcccaggccttagtgccattatggcctctgtgcaaagctgggtgggtggtggctgtttattgttgtctttgtaactcttgatgataaatacagcattttgaaaaagatcaaatcatttcccaggttataagcagagctgaagtgattacttccatatgggcaacatcccacagtattaaagatattaataataggtgacctttattgagtatatactatatgccacactgtgcactaaacatttttacatgcattagcccacataatctgcccaattaacctgtgtgacaggtaagatttaatttcaaataaacatttggtaataaaaggaaattgagagacagagaaattaggtactgagttcaagatcaaagagcatagaggtggaaaaactgggattattcaaactcaggatgtctggcttcaaagcccacctgcttaatcatatgcaggtactggcatttggaagaagtccatctttaaggtggaggaaaccaaatataggtgggactaattggcagatattgttggtgtgctcctctgtctatgaaagccatgcccagagtcttcctttctcagtccctgacaagactcaggtacctataagacctccattctgtacagggtttgtctttgttttccccagcataagagacaatggaaaacgagagcaaaggactcagaccagagcagaccttgtagagtgggagtcataagtaccgcaaacctgcacaagagatgaaagagcagtcaaccgtatgttcttttcatggaatactaactctgtaaataatcttgcatgtgctctagtccagtttcctaacaacaggtacatggattgattagccaaattattcccattgcttctctgtcataatcagtgttttcattacatgcgtccctttccctcattgctcttcattttcctcactcaagacatctatgagctacaatatcattttacctgggagacattgatgtcaatgaagtacgtttttgaagtacaaagctccaagaggctgttatttgtccagagccatgaaacatgttaatgcagagcttgaatttctacttcctggctcacagtatagtgcttttttcaagcaatgagtggagatgtatgggtaccctcctttcccagattacttccatcacaaggaccagctgctaaactcatactggtagcatcctacccagtaccagcctttctgaatagtctcccatagttccaattcacacatacacatttgccagatggtcttcaaaacatgccaaaatagttatcatgtcctacccgatatttgctccaactgcatcctcagtctcatgatctttaaatttactgctgaccatggtgctagtcagagcaacataaaaggacatgcttaacctcagggctgaaggagatgacataggtgaaggatagcactcactgatgcatagagactcagaaaacagaaaacaaggtgctgttctaggaatttagcataaaatggcaactgagagagacattatgcatgccttcatagtctgtcttctagtgaggagatagatgagcaagtaaccaaaatgtatctattgggagggcttcttgaagacttaaagcacaagaagaaaacaatcatgtgaagaatggaagaagagaggtccatccaaagaaatgactcatccaaaggccctgcatttggaaaaatcttggcatacttagctacctctcagagagtccagtgggactaaaggacaggaagacaggaggagagaggaagaggatataaagtggccagcagttagatggtgcaggaccatttaaatcataacatatagcacaggcttcactctgtctgcagtagaaagccattaaattggtttaagccacgaagagacacgattcgatttatatgttaaaataacatcttattatggaaaatttccaacatttacaaagtaatccaaataatataacgaaccttcatgtgtccatcacccagattcaacaaattatcaaaaatttcccattcctgcatcatttacagatcatttactccctgccctcccacttgtttactgtcttttttacagttttattttcctctttttgaggtaaaatttacttacaataaaatgtacaaatcctaattttgacaaatgaaactccgattgttatctcagaacatattcatcttcccagaaagttccttcttgtttcctcttaatcaatccctaccaattaacccccaagaaacaatgattgtgcttgcctttttatcttagttttgcttattctaaaagctcatattcatgaaatcacacggtattttcttgtgtcttttactcagcatgtttttaaaattcatttatgttgtgtgtgtcagtagtttgctttttaaaaactgattagtattccgttgtataaatatacaatatgtttgtcaattaacttgctgatggacatttggattgttcccaatttttggctaatgtaaataaacctgctatgaatgttgtacaattattgctgtagacatatgtttttgttattcttggctaaatacctaggagtagaattaatttacacgtttttaagcattgggaatagagtagagggggcagggatggtggcaagaaaagcagttaagaggctattacagtagttgagaaaagagactaggatgacttacactgggcagtaattgtagtaagactgtcaggggacagatttgaaatatatattgataaatacggtcaagaatatttgccagtgaattaaatgtgaggggtgagagaaatggaagaatggtctctagcttgaaaaactgggtgcctattaggatcttttactgcaattaagaaagtggaggaagaacaataatttaggcaacatccaaggatttccatttgcaatggctgaggcatggcagagtagacattaagcagacacatggagcctgcagcttgggaaagaggctgacccaccatcacctggcacacagcttctgcactgctcaggtcctgccttctccctaaaatacctcaacatcttgtggagggatggaaaatgggttttgttttatgaaccaattctggtaattggtaatagctacctgtgacactgtgcaaagaaagattctgagaccacattctgggctggtaggtaaggagtgctgtgagtggtaaagcatgtccttctggagcatggagtagcagtacaatggaaacaactcagatattttctatgcctgagaaaatagaagtccacaaccaaatcaacctaaaaagtgaagaatttgctgtggaataactaactaattaataatacagacagaagtccaaactgtgcaaatatacagattgacccatataggtcaatctatattatttacttctcaatttcaactcctctaccaaataacctactgattcagtatccttcaggtcctcagtaaatgcttctgacttttcacctgatctccaaattgcaaaaatcccaaaatatgctgagttcctcatcgttggctgggatcctctcatatcttgaggttaaacaacccattcgtgtgaaaacacagttcaaaggatttcaaacttttaaatacaatgatgaatcatttaaataccctgggggaaatgtcaaagagtggattagacagataatcaatgtataatagttgcctcgtcttttcattcccaactgaagccataggtgagttgttctcattattaataaaactatctattcattcatttattcattcattcatttaatcatcaaccttttgttgggcactaaatttatgccaggccccatacttggacctgagtagagagacaaataagtctatttacacatagagacatgtaaatgatcccaaggagagttagataccacattcctctgttaaatattccaaagacaagtgagagaaactcttcaggaggtagaaaagctaaactcagtcttgaaaaactattaaattaaaagtttctctgaaggaagtattgggaaaggatattctaaacagagaagccagcatgaacaggtctgaacatgggatggagcaactggtgggtgttaaagcccaaggagggtgtgattgaggaaatgggctgtcgcagtagaggtgtgagtgcctgtctgatgatgggacttggtgcaattatggctgcaatgggagtcattactggagctttagtaggaggacggatataatcagatatgtattttagaaagattttgtagtaatgtggtgactgcaggaggggaggaaatacaacagaaagaaaattgcaggcaggaagcaacaggaagtgaggaagtaaggaaaaagagggcgaggcacagaggcaagagggtcaaggattaggactgcgggttaggattagtgctagtgcttggcaatagaaactaaacagagaagaaggtagaagttcagactatgagagagtgcatgtagctgaaaatagaaacctcataatgtacctgtgcagggtactttggaaatgcctgtgatagaaccaaagtctgtctaactccaaagccaatactttccacattttcacactcccaggtagctttattcttgttcccacctcctcctgcagtagtaacaaacctccaagagcccatagtcccagacattttgacacctacacccatgtacttgtgtgcgtgcacaactctacctacctaaacacggtctaatcctacttatttttctctaaagcctaactcaactttctccttgtccaagaagacttgtcacagctccttacctgaaaattacatatttctaagtgctaacctctatatttactctcatctctttttacattttaccttatatctgagtcggttctgtacatgtcatcttctggctagacagtgagcttgctgaggctgcctatgtaagatgcacctccgagttttctttgagggttcaatgatactgaatgacataagcccttgctgcatgtgccacctcactgggtcatctcaccttccgaaccaagcttatcaacagtagattataaccaccttatagatgaagaaacagcctggaggaacagcccttgaatccagattttctcatttgttctcttatctctggtggtcctcattcccaggattacccactgtgaactggataccagggcttcatgggtaaagcatattattaaaacaaatgcttagctcagactttcattcctgtagcactagctgctcaattcaaagacaggtagcaggccttgaaacgctgtccttgaaacctccttctcttctttctcctcctagatcaactgactgtatggatctcagggaaatgtattagcatttcctcctacatatttagggaacagaaatgtggatccccgttttctttgtgggaatgcagatacttaagataggaggggaggggaggagagcagagctagctggtcttccagggactccatgaggtgacatcatgctcactgagcattttccatgtgccaaataccgcactaagcatgtcattttggttctcttcagataatctgctaggtaggtattatgacctatatttcatagaagaggaaagtgatgctaagtgatatgaaggaacttgttcaagttcataccaccagcaaatggcagaaccaagatttaacaattgtttagggatcatggcagacaggaggcaggactagattgcagctccggacagagcagcatgtggaggcttgcactgtagatttgagctctggatcaactgcaagaacaaactagcaatcccaagaggacccacagaccctctgaaggaagtggactgctcctgcaggacctgggagacaccccaaatactgtgagtgctctaactgcggaaatgaaaaagggagacccttctctcccaaacacacacccccactggagaggttgaaggtctgtttgtgggagaagcttctgactttacctgaagctgagtaaagttagagagctgagcaaaatacaggggtagaggaagcaacagaaagaccctgggtctctaagcagcccattcttgcctggcattacagggaaccatcaggagggtggcgagaggagcagagggtaaaactccacagggagaagaaattctctagctgagctttttaacaacttcagtggggtgagaagcctcctggccagaactcagggcagggcgcaaattgggcgtgcagacttcataggcaaggaaagaagtaaagcccttttcttttgcagctgggaggcagatagctttgggcaagttttcaagcccatctcaccctcctcctgcaaacagacttggtgctgctgtgggaggggcacggtgagaatgcgaccagccctttggttggcataggagctgggtgaggcctgtgactgccggctttcccctacttccctgacaacctgcgtgactcagcagaggcagccataatcctccccggtacacaactccagtgacctgggaatctcacccgcatcccccacagcagctgcagcaaaacccgcccaaggagagtttgagatcagacaggcctagccacgcccccacctgaaggttgttccctacccaccctggtagcaaaagacaaaggacatataatcttgggagttctagggccctgcccaccaccagacccctctctacactactacagctgatactttctggaaagtgccacctcctggcagggggccaaccagcacaaaaatagagcattaaaccaccaaagctaaggagtctcacagagtccattgcaccatctgccacctccaccagaacaggtgctggtatccacagttgagagacccatagatggttcacatcacaggaccctgtgcagacaacctgcagtaccagcctggagccaggtaggctcactgggtggctagacccagaagagagacaaccatcacttcagttctgctcagaggaagccacatccataggaaaaggggaagcgtactatatcaagggaatatcctgtgagaaaaaagaatctgaacaacagccttcagccctagatcttccccctgacagagcctatccaaatgagagggaatcagaaaatcaactctggtaatatgacaaaacaaggctcttcaacacctcccaaaaaatcacactagttcaccagcaatggatccaaaccaataagaaatccttgatttacgtgaaaaagaattcaggaggttagttattaagctaatcaggaagggaccagagaaaggtgaagcccaatccaaggaaataaaaaaaatgatacaagaagtgaagggagaaatattcaagggaatagatagcataaagaaaaaacaagcaaaaattcaggaaactttggacacacttttagaaatgcaaaatgctctggaaagcctcaacaatagaatttaacaagtagaagaaagaaattcagagctcaaagacaaggtcttcaaattaacccatttcaacaaagacaaagagaaaagaataagaaaatatgaacaaagcttccaaaaattctgggattatgttaaatgaccaaacctaagaataatcagtgttcctgaggaagaagagaaatctaaaagactggaaatatattttggggaataattgaggacaacttccctggccttgcgaaagacctagacacccaaatacaagaataacaaagaacacctgggaaattcatcacaaaaagatcttcgcctaggcacattgtcattaggttatccaaagttaagatgaaggaaagaatcttaagaactgtgagacataatcaccaggtaatctatgaaggaaaacctatcagattaacagcggatttctcagcagaaacccaacaaactagaagggatttgggacctatctttagcctcctcaaacaaaaccattatcagccaagaattgtgtacccagtgaaactaagcatcatatatgaaggaaagatacagtaattttcagacaaagaaatgtggagagaatttgccattaccaagccaccactacaataactgctaaaaggagctctaaatcttgaaacaaatcctggaaacacatcaaaacagaatctcttcaaagcataaatcacacgggacctataaaacagaaatacaagttaaaaagcaaaaacaaaagacaaaatacaaccaaagtacacaggcaacaaagagcatgatgaaagcaacggtacctcacatttcaacactaacattgaatgtaaatggcctaaatgctccacttaaaagatacagaaccacagaatggataagaactcaccaatcaactatctgctgcctttaggagactcacataacacaaaaggactcacataaacttaaagtaaaggggtggaaaaaggcatttcatgcaaatggataccaaaagtgaacacgggtagctattcttatatcagacaaaacaatctttgaagcaacagcagttgaaagagacaaagaaggacattatataatggtaaaaggccttgtacaacaagaaaatattacaatcctaaacatacacgcatctaacactgaagctcccaaatttataaaacaattacaactagacctaagaaatgagatagacagcaacacagtaatagtggggagcttccatcctccactgatagcactagacaggtcatcaagacagaaagtcagcaaggaaacaatggatttaaactataccttggaacaaatggacttagatatgtaccgaacatttcatccaacaaccatagaatacacattctattcgacagtgcatggaactttctccaagatagaccatataataggacataaaacgagcctcaataaatttaagaaaattgaaattatatcaagcactctttcaaaccacagtggaataaaactggaaatcaactccaaaaggaaccttcaaaaccatgcaaatacatggaaattaaataaccttctcctgaatgagcactggatcaaaaacaaaatcaagatggaaattaaaaaattcttcaaactgaatgacaataaatgacacagcctatcaaaacctttgggatgcagcaaaagtggcgttaagagcaaagttcatagccctaaatgcctacatcaaaaattctgaaagatcacaaacaatctaaggtctcacgttaaggaactagagaaagaagaacaaaccaaacccaaatccagtagaagaaagtaaataaccaagatcagagcagaactaaatgaaattgaaacaaaaaaagattacaaaagataaatgaaacaaaaagctggttctttgaaaagctaagaaaattgatagaccattagcaagattaaccaagaaaagaatagagtaaatccaaataatctcactaagaaatgaaaaagtatatattacaactgacaccactgaaatacaaaagatcatccaaggctactgtgaacacctttacgcacataaactagaaaacctagaagagacagataaattcctggaaaaatacaaccctcctagcttaaatcaggaagacttagataccctgaacagatcaaaaccagcagtgagattgaagtggtaattaaaaaattagcaacaaaaaataattcagtaccagacgaattcacaacagaattctacaagacattcaaagaagaattggtaccaatccttttgacactattccaccagacagagaaagaaggaaccctccttaattcattctgtgaaaccagcatcaccctaataccaaaaccaggaaaggacaaaatcaaaaaagaaaattacagaccgatatccttgatgaacatagatgctgaaatccttaacaaaatactagctaactgactccaacaacataccaaaaagagaatccaccattatcaagtgggtttcataccaggaatgcagggattttttaacatacacaagtctataaatgtgatacaccacataaacagaattaaaaacaaaaatcacatgatcatctcaatagatgcagaaaaagcattcaacaaaatccagcatcctttatgattaaaaccctcagcaaaatcagcatacaagggacataccttaatataataaaagccatctatgacaaacccacagtcaacataatactgaatgaggaaaagttgaaagcattccctctgagaactggaacaagccaaggatgcccactttcaccactcctcttcaacacagtactggaagtcctagccagagcaatcagacaagagaaagaaataaagggcatccaaatcagtaaagaggaagtcaaactgtcactatttgctgatgatatgatcgtttaccttgaaaaccctaaggactcctccagaaagctcctagaactgataaaagaactcagccaagtttccagatacaagattaatgtacacaaattagtagctcttctatacaccaacagcaaccaagcagagaaccaaatcaagaactcaaccccttttaaaatagctgcaaaaaataaataaataaaagacttaggaacatacctaacaaaggagtcgaaagacctctagaaggaaaactacaaaacactgctgaaataaatcacagacaacacaaacaaatggaaacacattccatgctcatggatgggtagaatcaatattgtgaaaatgaccatactgccaaaagcaatctaaaaattcagtgcaatccccctcagaataccaccatcattcttcacagaattagaagaaagtaattctaaaattcatatagaaccaaaaaagagctcacctagccaaagcaagactaagcaaaaagatcaaatctggaagcatcacactacctgatttcaaactatactataaggccatagtcaccaaaatagcatggtactggtataaaaataggcacatagaccaatggaacagaatagagaacccagaaataaacccaaatacttccagccaactgacctttaacaaagcaaacaaaaatataaagtggggaaaggacacccttttcaacaaatggtgctgggataattggctagccacctgtaggagaatgaaactggatcctcatctctcaccttatacaaaaatcaactcaagttggattaaggacttaaacctaagacctgaaactgtaagaattctagaaggtaatattggaacaacccttctagacattggcttagtcaaggatttcatgaccaaaaactcaaaagcaaacacaataaaaagagataaatagctgggacctaatcaaactaaagagctttttttttacagcaaaaggaacagtctggagagtaaacaggcaacccacagagtgggagagaatcttcacaatctatacatctgacaaataactaatatccagaatctacaacaaactcaaacaaatcaataagaaaaaaacaaacaatcccatcaaaaagtgggctaagggcatgaatagacaattctcaaaagaagatacacaaatgcccaacaaacatatgaaaaaatgctcaacatcactaatgatcagggaaatgcaaatcaaaaccacaatgtgataccaccttactcctacaagaatgaccataatcaaaaaataaaaaaacagtagatgttagcgtggatgcagtgaacagggaacacttccacatggctagtgggaatgtaaactagtacagccactataggaaacaatgtggagattctttaaagaactaaaagtagaactaccattggatccagcaatccccctactgggtatctatccagagaagaagtcattatttgaagaacatacttgcatatgcatgtttatagcagcacaattcacaactgcaaaatcatagaaccaacccaaatgcccatcaaacaaagactggataaagaaattgtggcatatatatgtgatggaatagtactcagccatgaaaaggaatgaattaacagcacttgtagtaagttggatgagattggagactattattctaggcgaagtaactcaggaatggaaaaccacacatcgtatgttctcactgatatgtaggagctaagctatgaggatgcaacggatgttggggacttagggggaagagtggaaggggagctagggataaaagactacaaatatggtgcagtgtatactgctcgggtgatatgtgcaccaaaatctcacaaattatcactaaagaacttactcatgtaaccaaataccacctgtaccccaataacttgtggaaaaattttaaaaaaataaaacatatttttttaaaaaagcaattttatctgtttccaaagcctatacacctttctttatgtggcttccaaaagtaaaaaagaccgctgaggggttgttattacaggctgctttctgcccagggcaaactttcacaactagaatgctgaaaggaaggaaggttttgcctacagtcttgatcattgcattctgaggaagagggacgtagatgaataagaggaaaacaggggcatgcaacaagttaaaaagtcaagcttaaggacaagagaagagtaatcaaaagggagaattataaaaagaattgcttggtttgactctgaaaggcctttctcccaagtggtaaaaataatgcttacagagtgttcatgatggccagcccctcttctaacacctttgcatcctagaaacttatttaatccaccaacactctcgagatagtattagaactgtccacaacaataggtgacaaaactgagggcacacagaggttaagtactatttttcccatggtcttacaggaactagattcgagaacaggaatttgagaccaggggcctgagtctcagttcacactcttaactaccggacatggtgcctttagaataactatgagtggggaaggcctgacttaaggagatgaaaatctctaatttgaggtccaagatccctacccttaaaggactgaagaagttcacaaaccatggagataacattgtgaccaacacaggcaatggtctggaaccactggttaattaagtcgttcatctctttgtgatctctctaagccactggttcctggccttaggtacacattagaaccacctggggagttcttacaaaatgctgctgcctgggcctcatgccagactgattgaattggaacctcttggggtgggtcctcagcatctatgtttttttaatgttctccaggtgatttctaatgtgccacctgggctgtgaaccactgatgcaggtaactgtggacgaggtcatcactgagtggagtgccaactctgcccagcagctgaaagcctttcacatggcctgcaaagacattctcacaaagcctcttcagcctgcaaacacctcaaggacaggcattatgtcccatacaattatttgggtattgtccatgacatctatcatgatgacagctgagtcatggagtcagaagctggctgggacctctccgctcattgtatccagtgtttttgaattccaggaacttacagaagggccaaagtggactgctttgggtggttgggcatggagatgtgagtcactggtttggtgaagtttccagggaactcgaaatcagagaaggtcagcaagaccacccaggaaacaacacacaatgtcttcagctcctcggacaggtgggattctttattatcaagctccagctctgagaaaagcccctgtgtctaacctcaaatctgagagaactaaagtgacggcactaccaatttagaactgcaagacggaacactgctgccctcaggcagctgccatgtcctcttctcctgggttatgtgagcacgtgtccgtctctcatactagactttaggaaccttcaagaataagcacattgtgtcacatttctttgtatttaatgccacacaaccacacacctattacacagtggaaaactaataaaggcttctttggtagaataaatactagggctgacattgcttgctctctgaagtcctttgtagtggtaagtgtttacacagaggcctgggcatgtacaagtatggacttcagatgaaagaaattgaaaaaagaatacaaatagctgatagatttgtgaaaagattcacatccttgctgaaatttaaaggaaagcaaatttttttaaaaatggaatttttttgacctatcaaactgacaaatgatttggatcagtaatactgatccagtaatactgaaggctaacaggagtgtggaaaagagactgttagtgagaacatgaattggaatagcttttttaaagggcttactgcatgacaattataagtatgaatactttggcccaataatttatttctaaaaaaactatcccaagaagattactggatacctgtacaaaatgctgtttatgatttttcaaatggaaataacttaactgtctttaaaaataggattgagtaaataaattggggtatacccacacaatagaatatgctactgttgtgaaggatgaggaaatctttaaatggctaacgtggaaagacatccatgatatgtttttaaatgaaaatcccagattacaaagtaacatgattaatatggtcaaatttttaccagaatgggaatctgtaatatacaatatggtatagcaatatatagatacacagatgatagacagatggataaatgaaattatcttcaaggataaacattatcctgttagtccagctgctgggtttatctgaagacatccatttactaccacacatacatctctattatttaatttctttaacaatctacattggttgcttgcttttacaatccaataaatctatttctgtttcaaaaggcagaccaagaagtggaggcattagtaaaagaggttacagtgttctgagtgaactctagcccaaatcgggtaggtgtggaggacagcctccacaatcctcttctcaacatttctttcttcgacactaaggtctttatgggcaggcaccattaatgtatgatggaaggaagaaaaggacagggaaggaagggaatgagagaaggggaccaggaatcagctttcggggtctgcctcgacttagggtttttctgggttacagggaaggactttcagtgctaatagaaaactcataggaaaatggggatgagttgatcaccttagcaggaggaagggagatgcctatctttccctggttcgataagctattataccttccaacagcccattctgcagcaaaagaattggcttctagatgtcaagaaagatggattccaatcccacctctgccactaaataactttgtgacctttagcaagccactcaccctcccagggtcttagctttttcctgtaaaacaatggagtggaaccaaatggtttgaaagtcccatgaagctctgtcactcagcactgaggcctctgtctagactctggcattcttccaatagtgtttcttatgagaatgttcattgtttcctgacagcagacctttagcgtttcaaaattaaagacaatgcctttctgttgatagatgccccaccccaggcctggcatggtattggactttcatgagttggctgtccagtgggccctcaggggagcaggtggtggctgtcttccctaactcactcctggacagtccaagtagggcccagcttggcaggaagaacttgattaatgtcaaaggcttttagtaagcaagtgaagcattttaactgggaggaaacaaaagcaatgagtgacaaacccattagccacgccactcaaagccaaatgaaaggaagaccacgatgtgctgaagctggctcccactgacacaggagagtgggctactcctacccctctgaactccactttcagtggtcaccttggtggctcgaaatgagccgtgatgggagtatttacactgcagaagctggcaaacgctaaaaatttaggatttatttctcccctccctcccttcccttccctccctccctccctctcttcctttccctcctttcttccctccttccctcccttattcctttccttttcctttcttcctttccttcttcctttctttccttcttccttccttcctttcttcctttcctctctttctttttctttcatttttttctttctttttctttctttctttcctttttttctctttctttttttccttctttctctttctttcttcctctcttttcttcatttctttctttttctttcagagagagagaaattaccagggcctatcactgactgagttagttcagggaaagaggaagctcctcccggccttgggctccttcttgaagatgcaggaacagcctcaagctgagctactgagcttgccctttcttgagtgaagacaagggagtccctccatccagggctaggcaagtgtcagaagtcaagtgatagaaggtgagaggaggagagggaggagaaagagggaagactaagcacatgttaacaggcctaatcaaaacattcaaacctctcttagccattcattggtcatctggggtggtagtgagttcaagtccaacatagcaggtgttcaggcaaccattttgcagaatgatatgaagacagagggaggctttgaaagtagaaaaagcatgaacgtttgagtaagagtggtttaggcttgaagcccaacctgaccataaaccgtctgcttgacctcaggtaaaattatttaatctccgtgactcagtgcccaaatttattccatggtgataatcaaaatttaattaatagaatttgtacatgcttggcccatagtaggtatactggctgagtagaatgtagtaactgaactataaaaaaagatatctgatacctgacacctgtatactttagagacagtttttcagcctgactatgaagttcgcaaagcaatctccacttttgatggacataaattcctcagtgactcttcacaatctctaagttaagctggtgcacgaacaagttttgccttcaaagtgaccataccaataaagcagtaccccctggtgatgtggtcttacagcccccagcagtcttcattcaggcctaatgggtactcaagcaagcagaagctgggatactgagtatcaggtttggggaagatgtgaggttctgcttgagaccttcaaaacttctatccatttgggtacatgattccccttccttcttgagccacaggtagctcatggtaccttctagaaactcagaggaggttaaaccccatggtctgggaacaaaaggtaaagacagaagtcagagctgggacttaacgtctctgttgctacattggggaaaagtttccaagtctctaccgaaaaaaagcaagagctggaggagaactccataggctccctgagtcccatgtagcatagagatacaagatggcctcatcaggactgggacacctgctcctacgaggaattgctgaccactctctcccacccccaccacatgggagaaaagaacagcaaggacaccaataaccctggtcataatggacccacaaacaggccacaagccaagagagtctgtgccatgtctccttgtgtgctaactccctgcatactccatgatacccaccttgttccataggtgctttcttaagctgggtactctgactccaagagaggtttagggacagcgccacagaggcagagtctgccctcccactcttacaaagctgatgatggatgagttggggattcttatctccactgctcgtagtccaaaacatgcccctctaattccatggcccagtcgtcaacagattccctgaaactccaagttctgaagctgtgggaagatatgacgtacttctcagaagtccagaagtcagtaggtccccttttggcttctcaagtgtgcacacacccttgttacatgcagcactctgagtgatgaattgtgattaggccagatatctccatacccctggacaatatgtagaatagagtagataagtgatatatccaggtattgagatagtctaggggccgcagggatgtaggcctagattccctgatctgtcccttggtcaattacataaccttgaggcatgtcactggctcttggtgggcctcatccttcccatatgtaacttctgtggattttatccatttctagtccaacacatccacttctcaccatctgcactgttctcttctgagaccatttttccagccctctaactggtctccctcatccactcaccttccctaccgatgatcagagaaaaaaatccaataaggacacttataaaagaagagggggcggggagatagaaggaagaaacgaatagaaaatcattacttagccgggctcggtggctcacgcctgtaatcccagcattttgggaggccaaggcaggtggatcacttgaggtcaggagttcgagaccagcctggccaacatggtgaaactctgtttctactaaaaatataaaacttaaccaggcatggtggtgtgcacctgtaatcctagctactggggaggctgaggcacaagaatcgcttgaaccaggtagatggaggttgcagtgagctgagatggtgccactgcactccagcctggacaacagagcgagactccatcaaaaaaaaaaaaatcattaagtatagtctcaaagacattttctagggagagaaagaaagattctggctaagaaaaaaagaatgtctaagtggaaggatgaaggttgtcttttttcttaaaagtcacatggcaggcgcaggctgacaacaggtggcgagaaacagcacagggtgggaagtgcagaagggcaggcactggccacgtaggctggggacagctgattcagggtgaaaatgaaagacaaagagcagctgtgctttgtgctgaaaggaagctagggggtttttgcagcagggcaggcatcggggcgagaagtcctttcccagtcagtagtgctggtgctgggctggggacgcgattgctgcatagctgtgagtctgcctcagcaccgctctgtgcatcgcagctctgcctccctctcaaggtgccaactcagtctccgtcgtgtggctcccagatggtccccatttcaatgctgagcccagctgttgcagcagcctgttaagaagaagggcattttggggcttgctgtgttgtttttaaaaaaccctgtgaagaaggctgtatttccccatattttatagataaggaaactgaggctagataaatttttaaggcggtacagttagaacgtggcaaagccagcatagagccagctgctagtgctttaaaaacttgaatttttaccccaggttctaaaagcaatatatccttataatgaaaaatatacaaactaataaaataacaaaatgaaagtcacccataaccctctacctagagatgaataaaagttgtgtatatttccttctagtctttttaattaattcctctgcatattatttttacttatttataaaagtgcaattatattataaaaaccattgcaaaaatcttcgcttcatgtgatggacgatttctctcaggcatttttatattcctgagaaactcattttatttgttacatagcaatacatcatagggctacaccataatttatttggtcttttttctactcttggacgtttaggtttcttcccactttgggggcttagtggataatttaagaaatgtttttttaactgtgcgtgccctggtactaaattttgtaatttcaaagagaggtcagcgtagacacatagagtcaatgagaaaaaatatacatggaaaaccattatgccaggtaacgtattcacagatcaaagaaccaggaggtgataggagaaaatgagatgaatgcaactcggtgggattccgcaaagttccatggagtaaatgacatttgatttaaaataggggtcaggaaactttttctataaagagtcatattgcaaatatttgagattctgcacactctatagtctctgttgcaagtattcaagtctgtcattgtcatatggggcctagtgtgcccaccctattgaaatcaccccgaaaagcagccatagacaatacagaaagaaatgtacaagtatgtctatgttccaataaaactttattttcaaaaacaggcaatgggctagatatagcccacaagctatagtttgctgatccctgatttgcacacccaaagtagagataggttttgttacgaccttatcagagggagaaggactgtagggaaagttagatattttatggttggctggtataggttgtggccaaaccatatggggtctgagagccaggttgtgggatgccaaaagtctatgaactttctgtagcagacacaggatccattaatttctatggaaacattttcaagtatcggggacccataatgttcccagaatgattagcatctctgagaaattatgggaaggaatcctagaaacctagaaagactgattttgacttacctactttattttcttgcttttcttcattagcatcttataattcactcagcttgtctatctagaggtcaaaacttatccagtcagaagaaacggggttggggcaacagtgggaggggaaggagctgtttgctggctgcctctcatcggactgtgaatctcagtgcctgtgatggagtaaagtgagagcagctggccacccaggtgtgtgaagtcagccagctccctgggctgaagaacaggcctccttctgcgtaaggctctaaatgtctctctccaactggactgtctgcacatgcagccaatatacggccttcagttccttctctccccagaaacctcatcctggtctaagacactggctcttagaccaagatgaagtttcatctcccaacaagtagcatttgcatcacttgggaacttgttagaaatgccaaaatctcaagccccaacccagacctactgatcagaaactcaggagtgtaagaaccagcaacctatattttaacaagacctccagaggatggtgatacacactgtattttgagaaccactggctaggatctctgtgctgccattagagctctatcccaaggggctaggcactgaactaatgaacattgcatgcaatgtaattctaacgatccccaaatctagttattattgccctttaacaaatacaggcaccgaggctctgacatgttaagaaatttgatctgaacctgggtcatttttattccaaaccccacattattgaccattctgctctagcaccctctctctatgcatagggctaggaggtctgtctttacaagtgtacttttccaaagactgtcatgatttattttcttaataacattcactgaccacctctcccatgccaggccctatcccaaagtatagcgtttattgttaagctccattctagtccaaaccctgcgagtaggtaatttgctttagcccctacagagcagaaaacacgcttaggaaggcagcattacgtgtttcagggccactgtagctctgagcattataaagtttcaaatgtgggtgccttgctggcccaagtaatcagagtgtggcttttttctttctttctttctttttttttttttttttttttgagacagagtctccctcagccacccaggctgcaatgcagtgacgcgatctcggctcaccacaaacaccatctccagggttcaagtgattctcctgtctcagccccctgagtagttgggattacaggcacctgccatcacgcctggctaatttttgtattttagtagagacagggtttcaccatgttggccaagctggtcttgaactcctgacctcaggtgatctgcccacctcggtctcccaaagtgctgggattacaggcgtgagccaccgcgcccggccagagtgtggctttaaagtgaggaagaagctgctctgggaatggaccatgtgcttgtgagagaggagaagtcagcaccctgagcagagcttcataggctcggtgagcctaaatgtggaaggtctgggcatccagctgattgaaactcaggtggcctgtgtgtcacaagctctgatgcagactcccaagacctcccatggctctgacgcagatcatagaaaaagccctttcccaatgtcccaggtttgagatcagtttcttccacaaaattagctgtgtggccatggataagtcactggccctttccgagacacagtttccccattggtactagactcaatcagtgggtttcaaacactttttaagttgcagaaagctttatctaaataatatctgacaccagattccaacacattaaatagataataaaggtagttgctctagttaattggaggaagggaagggaggaagtgaggagctgaaaaccattagcctttcctgactccctgcagtacatatggcaccacatgaagaagaagctacaacagcccacccaatctagcccccatcaccatgtgatatcccctgttactctctgccttcctcctctccagccttctttctattcctcagccgtcccagtcacacagcctccttagagcctttgcaccggctgttatcttggttcagaatgctcttcctccagacatcctcacctctttcaagtctttttctttttcctttttttttttttttttttttttttgagacagagtcttgctgtcgctccggctggagtgcaatggcgccatcatagctcactgcaacctctgcctcccaggttcaagtgattgtcttgcctcagcctcccaagtagctgggattacaggtgtgtgcaaccacacctggctattattttttatttttattttttttttgagacagagtctcactttgttgcccaggctggagtgcagtggcatgatctcggctcactgcaagctccgcctcccgggttcatgtcattctcctgcctcagccttgcgagtagctgggactacaggtgcctgccaccatgcctggctaattttttcgtatttttaatagacacggggtttcaccatgttggccaggctggtctcaaacacctgacctcaggtgatccacccgccttggcctcccaaagtgctgggattacagctgtgagccaccacgcctggccctctttcaagtcttttgctcacatactgctggctccatgaggcctagtgtgcccaccccattaaaatcacagccctcttcactcactagcacttccaatcccctctcccttcactctactgtttttcctttctccaagctcatatcactttctaccttcatatctaccttttattgtatatatagtttatggccagcctctctctgctggtaggcaacatcctgaaaaaagtatatcccaggtgcttaaagaagtgcctcagaatgtaataggccttccatacataattgttgttatgaagaatggagctttgagggctctcattgttcataatttgtcttcccatgtggtcgcccaacctaatatgtgcttccactgtcctgaaactcattcattttgtctggtgcagagctagagccctaagggcaccaaaacccagctggtctttctgactccatgaggctcagagcaaagccacttgcttgcttcacaccttcaacaaccttgtattatagtcagagagtgagacaggaagagtgggaagggcacagaagcagggctggaaaagcaagaaggaaggaggagggaggagagggcaggcagtactattgtgggtggcttagcgcaacacaagatcagcacctgccatgggccagttctgcagctggccatttctcacgggctgtctcatctagcctcctgaaaacaccatatattgcaggtgataactaaggaggtgaaccccagagaagtgatgtaatttgcccaagatggtcctgtgagtaagggagtacctgggattcggatccaggccatctggctccagagcctcctctttcctctctaccggtattacccacagagccacagtggagacgtgatgagtctttctcagggagatgggaaagaggccaggaatccactgtgtgtagctgtgctttctctgcctcattcctctcctgcagccacatgctctggtctgcagttcagggacctctggccctgggctcctctcctgtgatcgagccccgggaggcagctgcgctcatggtccttgtgatcacagttcctgcaataacctaggagaatgtttgcccacgtcataccctctccctttggtgtccgcggaggctgtgaagccagcaacacgacgttttgtctggctaagctttggggctgattgaaagtcttcagaacctgcactcctccggtgctgctcttcctggaaacggttaccatggaacacagccacgatgcagccttcactgtcagaattaatgaaagtcagaaagctattaggggaaggatttttttcctccctccctcttgcacataattctactcttcagtgaggtgtttgcatgtctgccctgcttgtgagatgttaattgcgtcctcattgaaattccttgcccactgccatcacctccttttgagctccagcccctgaagctggcctttttgagataatgaagctaagtgcccagagagagtgcgtcccagcctctctgaagaagcatgcatcttatcaggccacatcacagccgaaaagcattgtgtggctcccagcgaccccagaacatggcactcaaagactctcaaaaccaggttgcagttgcactttgcaggcttcctccttcctccaggacatcctgggttaaagttatagagggccagctctactctctgatgacatcttcacatctctgtgcctcttaggcccctacagcttctgtccagaatgccctcctcctggcctctccgtttcaccagctctcagtgttcagctacactggccatcttctcagtaaaaccctccatccctagagaagcataggtccaggtatacctatggctcctccctgttccccaggtcacatgtctcatcacaactatttgctgcaaacctgcctttctctctaaacagtgagtttcttcagagcagaggtaggctctgattcatccttcaattcccagagcctagcactgtacctggcacttcacagatgccccataatgccactgcttccttgctcctactccacctgttaatagaaggaaagtaaacacagctgagcccatgagggggcgaaagaacatagcgaatataacgatggattgctgtgtagactctacccactctctactgcccaacccaccgcagaggcactgaaaaagaaaagccaggtctggggccctaggagctcattctggctggtatttatagcaaggtaattagctcccttccctagcacccccggaagtgctgggagacaatctagaagcagcaatgaggaaagcaacataaagggattgccatagaaacatggggatggggctgggggcacttgggggaaacagaagcagcccccagcactttctgtgtttctcacccgtaagtgcaggagctcagtcctgaaaggaagatttcccaggggcggtctctgggctcttctttctgtggccaaaggcacccctcctccactcagcccaggcttgaaaggcactatctggtcccaccacagcagaccctgggtctgcaagagattctacatcatggagcagaaaaagtcccccaagttctcctaccttggactcctggagaagcttatcctcacccagataactgaaacttccctgccagagctggagaaggctggaggcaattttccttcctagtagtgacgcaagggagttatgacagtggattggatcctttccatcttggtgcccctcacctggactcttgcaatcatggtctaactgctcattctgtctctgttctcacctctgttcagttgaatctccacatttccaccagagtgatacttctaaaatgcaattctgatcatgttattttcctgctcaaaattcttcagcagctccccacagttttcaggatagaaattcttataattttgcatggaatgcaggctccatcacgctttgcctctctggccactgcccactccctccccccagtatgaagcccatgcaattttcatctcagtcatactaatcaatgtgtggttttccaaactcatctctctcttgccttggggactttgtccatgctgttctcactccctccccttcagactcctcctcaccttttaagtctctgctctaggactatatcctttcagggaaggcttctcaacctcccaggtagaccaggtacctcacttgttgctccattggaacttctgtgttcccacctagtgaatctcaaggcaagtcagaatcactggatttcctgatggcctctccaactgtatgtcaagtccttgtaggcagggccatattttcttgatttctgtaccctaatacctaacacaggactgacacccaaataggtgatttaaatgtcatagggttggcactagaatgaggtgagtgagccacccagggtgcagaatttaaggaaatgctctcaaatttgtgcaagacaggctggcatgaattgtcataaggggattttcacccttgctgttttgcttgtcaggtcacagcaagtcctgggtaggtgaaagggcatcaacgatttgggagatggatagaggaggctgcacttttctggaagaccttgaccttctagctccatgcaacactaaaaagcatcttccactttaccggaatttctatggaaatctccaacttcttgcatgtagggtaagatagggaagatgatccccacttaaatgcagtatcatgaactcctgagctgatggcttctacacttagctaaagtggactctatgaatactgtctgtgtctaccatggattgctatattcaagagctatccacctagctttctgtaatatgcaaagatagtttctaaaagggaccattaatagcctcttgaaaggaaaagaaaataccaccaaaactatgatgcactgccagggacatcacataaaaccactcagattcctcataacacaactccagggagcaccttcatataggttgcaatgtcaattgtgcccctggatttgtgcaatgtggtggccatttccccatgatctctcagctatacatgaactcagcccagcttccctggcactaaattcaaaacactcaaaaacatccttaccaccatccacagtgaatgagaaaggggaacaaacttagagctggtgagctggatccagactccacaaatggtcagcttctctcactttccaactggatgaccttaaaccaaatctctttaatctgctctgtgaatgtgaggccccatgttgggctcacaaaagaacattagcctgagaggtacctgcagagggaaggatgggcagcccctctaaagtaggctaggtgaagggagagtcttgcctcatgggaggcagaaggagattatgagggttaacaaatgtgtcagagaacccgggcaccttaggttcatttactttgatcccttcagttttcagacataggaactgaacggagcaatcaagacagtcctgcccaatatcattgaatgaattagcagcaaggaaaggtccaatattgccaggccagggcttattcagacacatagttgctttattttagtgatggagtgggtctggctgacagcttttgtagatctttattcagagtcagctggaaaaattagtccctgctcattgaagatcctcccattcccagagtgaagactcccttcttctaaaaatgggccaagagacaaggaataaagtacctagtaaggctttgccaagcagcctctattggcatctatctgaatcgctggcttatagcccatgaagagatgcatactttctggagtcaagcttccctaagtgagctccaggggccaattgcactgaaaccccctggggcttattaaaatctggctttcatagatgcaccccagatctactaaattagagcctaggggtgggaggataccattaacaaactccacatgggattttggcacacaataaagtttgagaaccaacacccagacattatagtggtaagaaggaacctaatgggtatcagatatctactttgctaggcactagatagatagatatccttagaagtgatagaaaaggcagaaacaagacattatttctttgccacacttagggaagctttgcaccagagggtacgcatctcctccttggttctacaccagcaattcaggtagatgccaccagatggtgctggaaagagctttccccagcacaggaaattaagacaatattattgggcccttgggtcattggatagcgctgagaacagcatctagaacccaccacctcaaaatccttctcaaagggagggaatgcatccttgaactttcactcaagttcgtactctcagcccttaaggctctgcacagaatttcacaaattataatttgctctatcttttcccacctaaattttaccctctcttctcaaaacttcttctgtcttaacactcctgctacattcttggctctcccacttactggttatatgaactctgacaatttgttttatctctataagcctcagtatttttatatataaattggagataatagtttcagagtagtagtaagtattagagataattgtagctcaataaatgtttagtctcttctgtacttaaccccattttcagaacgacaagcccctgtttaagaaaccccagtggctttctggtctcatttgcttctccatgacccaaactctccgatttaagttctcatcacacctcattcatgtctgctcctggtcctttgctcatgctgtatcttctacctaggatgccctcatactttcatccacgaatacaaatcccagcatgcttaaaggtctttctcaagttcttcctgctgcttcaggaagccttctcaaagtccaggccaacagactcttctgtcccctctgctccttcaggcactctctctgaatgctccactctacctcctggagatgagaacactagagtcatggaagtcagtgatctctaggtattggaattttatgtacagaattttttatttttttgaggaccagcaccaggccaccaccttttattttgccaggtgagaatatactattaaatcttgtattctagtattaccatcgtatcacaaaactgtgacattttagtaaaataaaagttacaaagggaaaaaaatctcatacaaaagcattgtcctttaaacggaataaactccacttcctaaaatgctcactgcattgcctgttttttgctccttttgccttggactgataaaaatactaccaaaggccagcttctgcaaaaatgcgggggagtccccagtccactcaatcacctgtccccgccccctggcaacataatgacaacctccacaacagtttccacttactgaacacttgctatgtgctagaccctgtgctaggtacttcatgcattaccttactaaatccttttgcacaacctctgaaaaatagatcattactgctaccacttttaagttgaggcttagaaaatttaagtaaccagtccaggtcaccgtgatggtaaagtagttgagttatgcttacagtaaaagacagtttgaccccaaaatctgtgctccttcttctgcttcatttcttgtctcctacaatgggaagaagtttttgaatgcaggagcataaggagatatgcttctctttctttgtatagtccatactcacagcatgcatttatttgttcttgtttttttttcctttgcatgctattttttttttatcattatactttaagttttagggtacatgtgcacaatgtgcaggttagttacatatgtatacatgtgccatgctgctgcactgcacccactaactcgtcatctagcattaggtatatctcccagtgctatccctcccccctccccccaccccacaacagtccccagagtgtgatgttgcccttcctgtgtccatatgttctcactgttcaattcccacctatgagtgagaatatgcggtgtttggttttttgttcttgcgatagtttactaagaatgatgatttccaatttcatccatgtccctacaaaggacatgaactcatcattttttatggctgcatagtagtccatggtgtatatgtgccacattttcttaatccagtctatcattgttggacatttgggttggttccaagtctttgctattgtgaatagtgccacaataaacatacgtgtgcatgtgtctttatagcagcatgatttatagtcctttgggtatatacccagtaatgggatggctgggtcaaatggtatttctagttctagatccctgaggaatcgccacactgacttccacaatggttaactagtttacagtcccaccaacagtgtaaaagtgttcctatttctccacatcctctccagcacctgttgtttcctgactttttaatgattgccattctaactggtgtaagatgatatcccattgtggttttgatttgcatttctctgatggccagtgatggtgagcattttttcatgtgtgttttggctgcataaatgtcttctttcgagaagtgtctgttcaggtccttcgcccactttttgacggggttgtttgtttttttcttgtaaatttgtttgagttcattgtggattctggatattagccctttgtcagatgagtaggttgtgaaaattttctcccattctgtaggttgcctgttcactccgatggtagtttcttttgatgtgcagaagctctttagtttaattagatcccatttgtcaattttggcttttgttgccattgcttttggtgttttagacatgaagtccttgcccatgcctatgtcctgaatagtaatgctgaggttttcttctagggtttttatggttttaggtctaacgtttaagtctttaatccatcttgaattgatttttgtataaggtgtaaggaaggaatccagtttcagctttctacatgtggctagccagttttccacatatggctagccagttttcccagcaccatttattaaatagggaatcctttccccattgcttgtttctgtcaggtttgtcaaagatgagatagttgtagatatgcagcgttatttctgagggctctgttctgttccattgatctatatctctgttttggtaccagtaccatgctgttttggttactgtagccttgtagtatagtttgaagtcaggtagcgtgatgcctccagctttcttttggcttaggattgacttggtggtgtgggctcttttttggttccatatgaactttaaagtagttttttccaattctgtgaagaaagtcattggttgcttgatgaggatggcattgaatctataaattaccttgggcagtatggccattttcacgatattgattcttcctacccatgagcatggaatgttcttccatttgtttgtatcctcttttatttcattgagcagtggtttgtagttctccttgaagaggtcctttacgtcccttgtaaggtggattcctaggtattttattctctttgaagcaattgtgaatgggagttcactcatgatttggctgtttgtctgttattggtgtataagaatgcttgtgatttttgcacattgattttgtatcctgagactttgctgaagttgcctatcagcttaaggagatttggggctgagacgatggggttttctagatatacaatcatgttgtctgcaaatagggacaatttgacttcctcttttcctaattgaataccctttatttccttctcctgcctaattgccgtggccagaacttccaacactatgttggataggagtggtgagagagggcatccccgtcttgtgccaattttcaaagggaatgcttccagtttttgcccatttagtatgatattggctgtgggtgtgtcatagatagctcttattattttgagatatgtcccatcaatacctaatttattgagagtttttagcatgaaggttgttgaattttgtcaaaggccttttctgcatctattgagataatcatgtggtttttgtctttggttctgtttatatgctggattacatttactgatttgtgtatattgaaccagacttgcatcccagggatgaagcccacttgatcatggtggataagctttctgatgtgctgctggattcggtttgccagtattttattgacgatttttgcatcgatgttcatcaaggatattggtctaaaattctcttttttggttgtgtctctgccaggctttggtatcaggatgatgctggcctcataaaatgagttggggagaattccctctttttctattgattggaatagtttcagaaggaatggtaccagttcctccttgtacctctggtagaatttggctgtgaatccatctggtcctggactctttttggttggtaagctattgattattgccacaatttcagctcctgttattggtctattcagagattcaacttcttcctggtttagtcttgggagagtgtacgtgtcgaggaatttatccatttcttctagattttctagtttatttgtgtagaggtgtttgtagtattctctgatggtagtttgtatttctgtgggatcggtggtgacatcccctttatcattttttattgtgtctatttgattcttctctcgttttttctttattagtcttgctagtggtctatcaattttgttgatcctttcaaaaaaccagctcctggattcattaattttttgaagggttttttgtgtctctgtttccttcagttctgctctgattttagttatttcttgccttctgctagcttttgaatgtgtttgctcttgcttttctagttcttttaattgtgatgttagggtgtcaattttggatctttcctgctttctcttgtgggcatttagtgctataaatttccctctacacactgctttgaatgtgtcccagagattctggtatgttgtgtctttgttctcgttggtttcaaagaacatctttatttctgccttcatttcattatgtaccaagtagtcattcaggagcaggttgttcagtttccatgtagttgagcggttttgagtgagtttcttaatcctgagttctaatttgattgcactgtggtctgagagatagtttgttataatttctgttcttttacattttctgaggagagctttacttccaactatgtggtcaattttggaataggtgtggtgtggtgctgaaaaaaatgtatattctgttgatttggggtggagagttctgtagatgtctattaggtccgcttggtgcagagctgagttcaattcctgggtatccttgttaactttgtgtctcactgatctgtctaatgttgacagtggggtgttaaagtctcccattattaatgtgtgggactctaagtctctttgtaggtcactcaggacttgctttatgaatctgggtgctcctgtattgggtgcgtatatatttaggatagttagctcttcttgttgaattgatccctttcccattatgtaatggccttctttgtctcttttgatctttgttggtttaaagtctgttttatcagagactaggactgcaacacctgcctttttttgttttccatttgcttggtagatcttcctccatccttttattttgagcctatgtgtgtctctgcatgggagatgggtttcctgaatacagcacactgatgggtcttgactctttatccaatttgccagtctgtgtcttttaattggagcatttagtccatttacatttaaagttaatatcgttctgtgtgaatttgatcctgtcattatgatgttagctggttattttgcttgttagttgatgcagtttcttcctcgtctcgatggtctttacattttggcacgattttgcagtggctggtaccggttgttcctttccatgtttagtgcttccttcaggagttcttttagggcagtcctggtggtgacaaaatctctcagcatttgcttgtctgtaaagtattttatttctccttcacttatgaagcttagtttggctggacatgaaattctgggttgaaaattcttttctttaagaatgttgaatattggcccccactctcttctggcttgtagagtttctgccgagagatcagctgttagtctgatgggcttccctttgtgggtaacccgacctttctctctggctgcccttaacattttttccttcattccaactttggttcatctgacaattatgtgtcttggagttgctcttctcgaggagtatctttgtggcgttctctctatttcctgaatctgaatgttggcctgccttgctagattggggaagttctcctggataatatcctgcagagtgttttccaacttggttccattctccccgtcactttcaggtacaccaatcagacgtagatttggtcttttcacatagtcccatatttcttggaggctttgttcatttctttttattcttgtttctctaaacttcccttctcacttcatttcattcatttcatcttccatcactgataccctttcttccagttgatcgcattggctactgaggcttctgcattcttcacatagttctcgagccttggctttcagctccatcagctcctttaatcacttctctgtattggttattctagttatacattcttctaaatttttttcaaagtttttaacttctttgcctttggtttgaatttcctcctgtagcttggagtagtttgatcatctgaagccttcttctctcaactcgtcaaagtcattctccatccagctttgttccattgctggtgaggaactgcgttcctttggaggaggagaggcgctctgatttttagagtttccagtttttctgctctgtatttttccccatctttgtggttttatctacttttggtctttgatgatggtgatgtacagatgggtttttggtgtggatgtcctttctgtttgttagttttccttctaacagacaggaccctcagctgcaggtctgttggagtttgctagaggtccactccagaccctgtttgcctgggtatcagcagcggtgtttgcagaacagcggtttttcgtgaacggcgaatgctgctgtctgattgttcctctggaagttttgtctcagaggagtacccggccgtgtgaagtgtcagtctgcccctactggggagtgcctcccagttaggctgctcaggggtcagggacccacttgaggaggcagtctgcccgttctcagatctccagctgtgtgctaggagaaccactgctctcttcaaagctgtcagacagggacatttaagtctgcagaggttactgctgtctttttgtttgtctgtgccctgtccccagaagtggagcctacagaggcaggcaggcctccttgagctgtggtgggctccacccagttcaagcttcccggctgctttgtttacctaagcaagcctgggcaatggcgggcgcccctccccagcctcgctgcagccttgcagtttgatctcagactgctgtgctagcaatcagcgagactccgtgggcgtaggaccctccgagccacgtgcgggatataatctcctggtgtgctgttttttaagcccgtcggaaaagcgcggtatttgggtgggagtgacacgattttccaggtgccgtctgtcacccctttctttgactaggaaagggaacctcctgaccccttgcgcttcccaaatgaggcaatgcctagccctgcttcggctcgcacacagtgcgctgcacccactgacctgcgcccactgtctggcactccctagtgagatgaacccggtacctcagatggaaatgcagaaatcacctgtcttctgcgtcgttcatgctgggagctgtagactggagctgttcctattccgccatcctcctcctccatttatttgttaattcaaccaatatttatgaagcatcaatgctcaggcagaggctgtcctaggtgctgaaatacagtgttaacaagggtagatagaagttttgccttcatagagggtacactatgacacatatgcacatgccaaatggtgatcaaaaatgcaatgccttgttagtaactccttgctctattccaagggcttttaaaataccaaggtgatagccaggtgggtacagatgttaaaacatgccctgggcctctctgggctcagtaattacctggttctcatatactgcctgcctctgctatggaaattgatgagccaaaggctcttttcagactggcaatcctgtgaactccaactccacttgctttgttagaaaaaggaactgaatttaaaagggacaaatgcaggattgattctgtaccttaaaatatacttccctcacctctctgcttggccccaggtccccaggtcacctagcccccaagcccccatttgctgcagagaagatcactctcttcaaagactcatttcatcccctcagactcactctgatcttacacctcttgaaatctgctctcccctttctcagattccttgtgacctccacctgcctttttctaacagctccagggcgatggtccagatcactctctgtgccactgtttcagacagcccagcagtcgtggcagcagtgttaatttattcatcccttaataccaaacagctcctcagtcagctcattcccagctgtcttggttcctgcaggacaatgttctgaacttactaacctcacaccttgggcctctgaccggagcctcatcacatcactggcatacagatcacaccacagtctgatggaagcttcacagcactaggcctgacagatgagtcacagctggaagggtcttcacagagtccaccagtgctattcaatgagagctctactgacattttaggtggagggctagggggatgtggtttctctttgtgtggagctcccttgtatggcaaggagacttaagcatccttgtccttcttccctgaaaataaatcccagggacagccaaacatgtgcccacacattcccaaatgcctgtaggagagaacaagttgagaagcacagtgcctattgtatttataaatgaaggaacttttccaaggttactgagtaagtcagctgcagacctggtgttctgatgggtgataggctacagggtttaatgggaagtgcactggagtaagaatcagaccttctgacaaccatgccggttgtggtacagggggctggggttgggggtggggcagtttgaggaactcaaaagtgtagagttggaaccaattattcagccttccctccatctggaaaagctaccttcacaggtctgtctagcacataccttggaggaattagcatttggtttcttcataaggtaactcaacccaagaaggaaaaagagtacttaaggtggactaagacaccatccatctgctaaactctggcaacttcctatagaccctcagtaatgggccactccccacatccacactccccattctgggctgggaccccaaaagtactcagccagagagactatgggctctccaaataggaggggtcttggctacccagtccccacctcttccgcttttattccttatccatgcccacttctgcctgtgggatttggaaggctccaggagaaaacttcaggctcacctgggaggagctagcagtctttccatctcccttggcatttgggtgacatgtaaatactggactagggccagaagcttgagttgctccatcagcctacctggtaccttccaacctgggcctcagttcttcccaccaagggtagacctgaagatgactgcagttccttcaatcctaaaatgttctattcaagaatattcttcaatgagataccaactccagtccctgaagatcaagacccccttggtaactaatcatccagcccttgtccacattgccaatctcaaaacagacctgagataaagtctcaacctctttgtgctccagtttgtcttttcacataatccaattgtctggaacttcttagaggccttatgaagatgtgataaccacatccaggagggagcagtttatgtaaaaacaagaggggatgagtgagtcaaatctaaatagcctcgggcatttctgccatgtccctggcaagtgatgattgaggcagggggcctgtaggaggcagttccccaggtttggggctggtgcccacaaacttgagtggcagtagttaggggttacccggcatctccccattatgcagccaggaactggggagtgggagaatccctggcagctctggcccatgacaacttttcccaaagtgctccgtgacaggtcattgcagggaagggagatgatggatggtgagatcccaccaccacttttctttctcaagtggaaagcacttgaaaagaagtgaatgagagaaagaacataacagaacaggtttaagaacattcaccgaaccagtccatggcactattgaatcaaagtgaaaatgagttgaagctgtcattgagagcttgtcagttgacttccaagaggcagttaatacagtgtaaagagtatgtacaggctttggaatcagattcatatacagattggaatcccagttctgtattttattagctacatgaccttgagcaaggtatttattttggcctcaatttcctcatctgtagagactacagtagtgcatgtcttatatggatgaaaagggaagacattaaggttttcctttccctacttccatgggggtaggagcttagaagcagctcagcgatatactgtggctgtggcaacagtggggaagaaaagagatgccaggaaagaactgtgggcagaaaattctaggggtggtagtggatcccggacaccaggtctacaccagtacacccccaaaatgaggtcatgtgcagtgagcagaagtgttaaaccttttggctccggggccagtgtcaggatcaagaggcaatacagtagaggtttcaggcaaagggctgggaggaacagcctcatcagtggacaactggaaggcaaagtggtattggccagatgtactggttaaaccagtgagaggacagactgctggggtagtgatgggctccagctcctttaaccacaaggccacttttctctgtagaaagaaagttggtagagttcagaatagcttctgagtcattagaagtgattaagtcccacccttgtccctcatgtccaatgtcattgtgttgtgccaagggagggctgagtgggagggagagggagctggtctggccctgtaggcaccctatgggagccaccttgttttgcatctttgatcaaggctttggaaagagactcacgtgtgatgcctgacttctagaggcagtaaagggaggctagaaagtagactcttcctttcccagtccacacaatttgcctcattttagtttttaaaataacttttattatgcaatatttgagaaatataaatcacaatacaactggcagccatccacctaccacccagattaggaaatatagctgaagccctccatggctctctacatgacaatactctccccatccttcagaaatcatcatgatctggaatttaggctttactgttcccataaatgactttatacttttattatgtatttatttatccctggacaacatatcgaattgttttgcatgttttcaaactttatatcaatggtatcataaaatatgcatatttgtctgaagcttgattttttcccctcaacattaggtttgtgtgatttatctgtgttgacatatgcagctctggtttattacttttccctgctgaaacgtttattatttcagaacaccacaatttacttattcattcttgttaataggtaatagaagctttattttcccaaagtttttctcttacaaaatgctgctgggaacattctcgagcctgagtccacacacatatgaggagataatgccttttgccccattcctaactccttcaccttttctagctcacacctttcccacatcctgcacccaagccactctgtttgggctccatgcttagactcctgtggtctaagcagtctcttgtttccctgaactggtttgggaattgccaacttgactttgcctttgggaactttcccagggattcatatttctgtcctccagcctcagacaaaaagcggtgggttagtgacccacgtcaagccccacaaagtcctatgtgacttgcctcggttgtgccaactccttcctggctcccacctgaccagactgtaaactccaaaaggcaagaatcgggactgacttatttcatgctgtagctccagttcaggcataggacctgatacactttgaatatttgttggctggatgactgcatgaattaatgctctatggagaagggatgtcagatgatcaggattacagatgcacttaacttgcaattatctctacctggatgtcttcagtcccccaccatgggtccttggccattctagttaatcttatctggactctgggccttttgtgtgaactaagaccacccgtcacttggtgaggtcttctcagataggcaaagacatccagtctctcccacataggatgaaccctagggcccctagtcatttgggggcacaggaggggaactactttccattagttggcctgaggtactcctaatggcgaacccctggagcccttaccctgtagaaggcagcagtcccctttgtctgctcaggttgctttttaatgcagcgcacatgctacaacggaggcacctgatggtagagccatacctgaaagtggatattgacaggaggaagaagaacgaactataaagggctcttgaacaaacaagtaataaagaaacattctggtgattgcggagaggtgggtgggactgagatgcagacaagggaaaccagggtcactctgggcaaatagcaagtcacagtaggacaaaaaccacagagatggataaagaggagttgcaatcaatccttccactggcccttactaatctgagaccttggctaggtcatttagccttacgtgataacagaaaactactatgtgtccactacagcccatgactacatgcctcatatggcaatttctaactgaatcagaacatcaactcagggtgctcaaactcagacctcacagccagacaggctgcatctcaagcaggcacatctaactgctgcaggacgctgactcctcaatggattgtgatccagtgtggttcttacaacatccatgatggacagatgaggatgatacatgggaaaccaaggcacacagttacacagttagtgaggatgctgcaattcaaacccagggtgttcagttgggttccacagcacaagtcactttggagatcatgaagcaattgctcaagaaaaggttatctagctcaaccttgcaaattatctccaaagtccatgagtccaagcccatctcacaggaatttctccactgaatcccctttatctaagagcacattcaaggaaattatggtgtcaatgaattcatgcattagtaaatttatttcataaatattaaacccctactgcatgcaaagcactgttcttggctccacaaatacagggaatgaaaaaccataaagtccctccttttgagattctcatgctggaatgtgcaaaggtccatagctcaatataatgccaagaaatttagcaagattgtgcattaggaacaacgaggaaattttctggaggaaagcatatctgattgttcagtgtcctaggtgcagcccatgggatatggccttgagcaactcataactcatgtcccacccctgggtcttcagtttctccatatataaaatggaaacattaaacaggatgatctcttgagttcttctagtcctattgttctctggctcccatttcagggcttttatatatcagtagcaatcaaaccctgggagaccatcagagggtaggggataaaatgtggccaggtgaacagagctctggagccccaggtgggcacagtggatcagcctggctcggactaagggagctcatgctgtcagtctcttcagaacaagactactcttggcctttttccaggcacctgaggtataaagctggcagtgccatcaaagacaggctggtggctacaatatgaaagggttgataaataaattctttttctccttaatagacaagctggtgggttttattgtaagtggtttgcactcagtggagagccaggactggcaatgctgcatctttcatctccaaatattaattaattttccatgatgctttattttaatcatgaaaaaatgagattggtaggaaccagccaagggaagagttggggagaagcaggcaaattttatatatatatatatatatataattttatatatatatatatatatataattttatatatatatagagagagagatatatataattttatatagagatatataattttatatatagagagatatatatataattttatatatatatatatagttttaaaagcagcacagataatgtaggggaaggcagttagagatggggagggttcatagacagaaagtgaagggttggaggagagaaaggaaactgatattttataaacacctactatgtggcactgtactaggttccttgcctatattatttcaatcaaccctgaaaccaatttgtattactatactcattttacagatgagcaaactaaagctcagaaaaagtagataactttcccaagatcaaaatcaaataaattgaaaatacagaattctaaccgtagctttctgacttcatgtctcaacctctttcaacaacatccattcaacctttgacaaatatttatccagtaatgattgtgcctcgggcatagtaccaggcactgtacaccctccagccctaacaaacacacagaagggtatttgaatcaatcttggtagatcttgaaggcctctcagaggaagtgatttctaagccgtaacttgaaggatatggaggagttagccctggaaaggaggagaagactggaggagaaaggacatcaggtatagcatgagttaaaggttataaggtgagagttcaggatccattaaagtaaccacaagaagctcatatggctgttaagtcttgagttagaagtcaggaggggtaaggcataaggtgggaggggccagatcatgcagataattatgacatcaaaggtgcctggattttaaccagagagcaatggcaaagccacagagatgatgccatgattttagtgttatggaaaaatcccattgatcatagtgcagagaatggatttaaaaggaggcaggattggccgggcatggtggctgtaatgccagcactttgggaggcccaggcaggcggatcacgaggtcaggagatcatgaccatcctggctaacacggtgaaaccccgtctctactaaaaaaatacaaagaagttagccgggcagggtggcaggcgcctgtagtcccagctacttgggaggctgaggcaggagaatggtgtgaacctgggaggcggagcttgcagtgagccgagatcatgccactgcactccagcctgggtgacagggtgagactccatctcaaaaaaaaaaaaaaaaaaaaaaaaaaaaagtagataggactatggcagctgcccaagtgagagatcatggtggcctccaacagggtagtggtcctcaaggtggaaagaaatgactacagaccttatgcaaactctctaaactcatttttacttagaagctcatacaagatgaggctagtttaaataagaataataatactctctaagcacacagaggaaggactttagagagaaggacagcatggaagaaaatgtgatcaatattttctgctcctttgttattacccaatccattagcacatattgaggcctcaggatatgccaagcagtcttttagacgctataaggatgcttttacctctttaccttcacaaagcttccaactagttagaaaaggagggcatacgttcttaaaaagacacctagcaatatacatcagagaggcacagacaagaagtaggatgcaggaagagtagtttgggttggcataaataggagtggagggggtgggagagaagaagatggattatttactagcacattctctacatgttgtgggttgaatagagtcccccaaaacagacaggttgaaatcacaaacctcagaatgatcctatttggaaataaggtcattgcagatcagtcattgcagtcaagctaaagtgaggtcacactggagtaggatgggctccatttcaatagggctgatgttcttgtgagagagaaaaaatggtcatgtgaagacaaggcagagattggagttatttttaaatttgtacttctaattgttatatcactagtttttttgtggttttttaaagatattttttatcatagttggttgaatccacagatatggaatccatgatgtggaactcatggatacagaggcccaactatgctttattatggcagccctaagaaattaatactgtgtatctcactttaccctcccccaaactgcatgaggtgggcattttcagttccattttacaggtcaggaatctgaggccccagaattaacatggcagaccactccaccaatatgtggtggacctttgctcggctgcccactatgggagtagttctggaggtaaatttcaaaggatacataggaaatagaagttaccagatctgatcatgtggagagcaggagagctttactccattttgtcatgcattgcttttgtccccaagagaagcaagtgtttactgggtgtcaggggcgggtttggagctgaagaaaaatcatggttgaattagacatggttgcccctgaggaattcacagtccagcgagggagaaagatatgtgaccagacacaatgaggtgagcagcctgtcactgtgcagacaaagcgcatggaagcacagcccctaggtactcacttattttcctaaccaagagacatcttgacaataaggcacctactgacttaacagcttgcagaaaaaggaaacttgatgacatcaagtgaacacaccacagttcagacatcaaaattttaaattcccaattgaaaaacaacagcaacagtaaaatatgggaaagtgcacatcttagaatcagggaaatactatagctttgcccagaacagggatggaaggttttctaaagattacagcacttgagttgaatctgaaaaatgagggcgaatgtgctcagggaagggccctgggagacaagttactcacaggctggtgatgctttttcccagaaaaatcccctaacaaaatgtcagctccacaaaagcaaaggctcagactgctttgatcactgctctatctgcaacacctcaaagaaaacataggaggctttccgtaactgtgtgtagatagaaagaattagcatcattagggtgagactgtatatgaaccacactaaaggcgactggaagtttggcttgcatcatctgaacactcatttttttctcttatgaaacctctaccctatacccatccagaagtgatttctgggaatgcacggttgggtaagacaaactctaagggttctcagttgacagaggagatgactaataagtgatttccataccgtgtgatgccccgtgatactgtgtgatacatgctctgatggcaggaacaaggtgaggaaaagcaggcaagtttggtgggggaggtgacattcaacagggatttagaggactctggaggatgagcaatagattagcctgctagaggaaagagggcgatgctctagaaagagcagcagctacattaagagagaaaagagagagagagagagagagagagagagagagagagagagagacagagagagagagagagagaaagaaagaaagaaagaaagaaagaaagaaagaaagaaagaaagaaaggaaagaaaagaaagaaaaaagaaagagagaaaggaaggaaggagggaaaagaaagaaagaggaaagaaaagaaaggaaggaagaaagaaagagaaagaaagaaaggaaagaaagaagggagggaagagagggagggaggaaagaaggaaggaaggaaagaaagaaaaaagagaaagaggaaaaaagagaggaaggaaggaaagaaagaatgaaagaaagaagaaaagaaagagaaagaaagaaaagaaagaaagagagagaaaggaaggaaggagggaaaagaaggaaagaggaaagaagagaaagaaaaagaaagaaagaaaggaaagaaagaagggaaggaaggaagagagggagggaggaaagaaggaaggaaagaaagagaaaaaagagagaaagaggaaagaaagaaaaagaaaaagaaagaaagaaaagagaggaaggaaggaaggaaagaaagaaagaaagaaaagaaagagaagaaagaaaggaaaaaagaaagaaagaaagaaggaaagaaggaaagaaagaaagaaagaaagaaagaaagaaagaaagaaagaaagaaagaaagaaagaaagaaagaaagaaaagagaatctcatagtattccgaaggctgcaaatagttcattgtgacttggaatgaacactggaaggtagaatacatggtatgtgtgactggcaggtcatacaggggccaaatcacagggacatgcctagtgagaggtctggattttattgggaaagcaaagggaattcccatgatatttgctaatggatccaagttcccagacactttctacctgctttgcaaggtgatctcctctgaccaggccacattctctcaccccaggaaccgcaaacacattgtccctgcagaccaccaaagagcaggattgaaaacagtatcaggaaagggagaagccatgtgtaacattaccttaatttaacattcttcctctctttcttgttttttttttttttttaaatcaattggtgattcataggcactatatttccccctcaatccattcgcaagagaagtgttataataacatgtcagggaggtgtggataagcggcatcatggagcctggtttataatgcagtttgttaacagatgctaacgtcccgattatgcattccagcatcatttatacccagctccatggcacggtaaggctcgtcacatcataattctccaaagcagttgctattaatcactcattcattattaaaacacattgtattcattccgcttggcaactggagcagggcaggctctatttatccagagcaattatcttcagactttgtcaacctcagcccagaagagcgtccggccctccaggatggctgagagctttgaagagacacctcaatgcagaagggaacacaggactcacagaagacatggatctcatccaaagggccatccatccctgagagggctgagggctcccaggaaccaagaccatctgtcccctggttgtctcctcctactgcgtctcccttcaacttgaaatctcttccctttaagtgaattctgctgggctttcttctgttcccaggtatctcaatatcacctggggaaccagagctactccccacttcctgggctcatatccaaacttacttgatcataggaagccatggagttttgtagtgaaatataagggctatggggacaaatcccttgccttctagcactcattgtgtgatgttgaataaataatttaacttctttgtccctcagttttatcagctgtaaaagggggttgataataatagaacctacttcatagagtttctgttaggataaaatgagttaattctgacaaaagtccttataaaatgcctgaaatataattcacatcagctcttgttactacttattaaaaccatcctagcatttcctaaatgttcccccgcccagctgtttataagcatgggcatggagatctattcctcgactctgtaaatggctgttgagcatcccaaatgtatccggtattgttttaagtaccagagacacatacatatacaaggctcagtccctccttcaaggggcccacccactagtaatgtagtgttgccaaaacagtactcagacctttagagatctggaagcccctctgtttttccccaaaagtctgtatttggttacgctttccagttcacacagtactttttctgcttaccacttcgtcaagtgcttacctgaaggtaacaaacacacggctcaactctcaacgtcaagtgagtacccagggtcactgagggttcccacgcttttaatgaaatatgccagcctaagaatgtacagaggataatttaatgatttaataatatattttatttaaaagattttaaaggcctgtgaatctctccttttgcaccatccagtaggaaccaccaatctcaaatccggtgtttatgatttccatgattatttttgttaacatttattatacaagtgtatgcctataaacaatatgtaagtctccgtacgtgttttcaaactttatatagatgataccacattgtatatatcctgtcgcttgctttttctaaggaatgcattttattacggaaaaattcaaacgtctgcaagtaaacagaatagtctaatcaactcctatgtatcacctggctccaacaattgtcgacattcagccattcttgatttacctatgccatcaccataccctacctcccatcaatcaataattatagcttacagttctacttttacattttataaacacctaaatgcataaacaataactgtatgcttaaaaaaaaagtagatacagccaggtgtggtggttcatgcctgtaatcccaacaatatgggaggctgaggcaggtggatcactgaggtcaggagttcgagactagcctggccaactttgagactagcctggccaacatggtgaaaccctgtctctactaaatatacaaaaattaaccgggtgtggtggtgggtgcctgcaaccccagctactcgggaggctgaggcactagaatcgcctgatcccaggaggcagaggttgcagtgagctgagatcgccccactgcactccagcctaggtgacagagtgagactccgtctaaaaaataaataaataaataaaaataaaataaaatataaagataaaaataaaaagtggatgcatcatgtatctctagccatatcaagatacagaacactcatatctacagaaaatttcctcctttgctgaaactcctcttcccctcctgccacctcacaccccagaaaaccatcattttggccttctcacctcagattacattttcccattctataacctcatataaatagaatcatatggcatatagccttttgtgttccttttgggagagggggttcagcactgtctctgagatttacccatgttattccatgtatcaatagatgcttactttctactgctaagtagtatcacactgcaggaatatagcacaattttgtattcattttcccattcatgagtattggggctgtttccagttcttggtaattgtgaataaagttgctataaacattttcatacggtactttttgtaggtatttgtttgcatttctcttggattaaggagtgttcctcttaacggtttaagaaattaccaaagtggttgtgctattttacattttctccagtaatggacaggcatttcatttgctctacatactccccaaccattgttgtgagctgatatttcattgttcaagacttttgcttacttttattaaattgtcattttattgttgagttgaaagagttctttacacattctgaatagcagtcttctgtcagaaatatgctttgaaaatattttcttaagtctatttattttctataacaatgatatattttgttgatcagagtttttgtttcttttgattttttgcaggggagtgggaggggggacagtctcatttagtcacccaggttgaaatgccgtggcactatcatgcctcaacgtagcctcaatctcccaggcttgagccacgctcccacctcagcctcccaagtagctgggaccacaggcatgtgccacaatgcctggccaattttttatttatttttatatttgcagagatggggtctcattatgttgcccaggctggtctcaaattcctgtgctcaaacaatcctcttgcttcagcctcccaaagtgctggaattacaggcatgagccaccatgcctggcttgtttcaatttttatgaagtctaatttatcatttattttttattttatttcagagttttcagagttttgtcttaacatttttcgttatcctgtaaacatatttccctgtttttttcaataagccttataattttagcttctatatttagaacagtcatctctaattaaatgtggtgtgtgtggtgtgaggtcagagattgggctcactttttttttgcacagatatcctgttgtttcagcacaatttgttgaaaatactttcctttttcctttgagtgacttgctgtttttgtcaaaaattaattcaccataaacatgtgtatctatttatgtattctctggtctgctgcagtgattgatgtgtctatctttatgccaatatctaactgtcttaattactgtagctttatattcatatgtcttgaagtcaagtagtttgagttcttcagctttctttttcaagattgtttaggctattctaggtcatatgcatttccatataaattctagaattgttttatctatttctatttttaaaaagccttatggagttttgatttgaatcatgtcgagctatggatcgctgtgggaaggtttgacatcctaacaatattgaattttccaacccacaaatatagtatatctcttcatttatttatgtcctctttaacttttctcagcaatattttgtagttttcaatatagaggatttacatatcttttgttaaatttatcaagcattttacatttttataaaattgtgaataaaattttaattttattttctattgctttctgccaatatatagaaatacaactgattttccgtatgtatcttatagtctgagatattgttaagtttatgtaaatcgttctaggagttttctttgttcattcctcaggcttttcttataaaattgaatactatctgtgagtttgaattaattaaataaaacttttgtttatagaaacaaattcttccttttgagtctttatgcttttagttttcctcgcattattgaacaagctagagccttcatacaatattgaatagaagattcagcattctggccttttttttctgatcttaggggaaaagcattcagggcttccccatcaagaattaacaatagactcttgcacatgctctctatcagaattgggattctagtttgttagaggatggctattccaatttgctgagaattactgtcattaatgagtgctggatattgttaaatgccttttctccatctattaagatgatcatatatgtttttaactttaatatattaattaaccagattacattgattaatttttaaatgttgaaccaaacttgtattcctgagataaaatttaattggttataatattctttttatatatttctgaaaaatattttgctacagattcttgcatctatgttaatgaagaatattttcttcccttttaatgtctttgtcatggtttgatatcaaaaatcaattcataaaatgggttaagatgttaaaacatgtattttcctcctctattttctggaagaggttgtaaaagatggtactacttcctccctgaatgtttgctagaattcacctgtgaaggcactggaaccaagagtttatttgttgaaatgttttgatttaaaaattcaatttttttcatgggtatagttattcagaatttctatatcatcttgtgttagttttagtttcatgggcagttggtcagttgactcaaggcgtttgctcatttcatctgaattgtagcattttcttgcatgattttttaaatagtattttctttttatccttttaacatctgtaggatttataatgatattcatttcttaattcatgttattatactatagataacttgtgtttttcctgtttttgttttttggtctagctagaagtttatcaaatgtattaatctttccaaaagcaatttctggatttcttggttttctatttttaatttttaaaaatttctgctgttatctttattatttcctttcatctacctttttttttttttttgcttgtttttatttttggtctttattggcagaaacttagatcattaatttatacctttcttcctaatataaacattcaaacttaacatttgtttcctctaagcactgaattagcttcatcccttgcttgtttggatactagttaataattacaaaaaataatgacagttattaaaaaaataaaaaggacactaaaatattctttgtacagattcacctctgttaatatttcttgacatttcaagttctctcttgctcgttcttactatgtatatgtgtgggtgtattttctgaaacatctgaaggtgatttatatatattgtagacatttatcactaaataattcaatgtgtttcccaagagtaggagtactttcttacataaccactgcaattattaaattcatacatttacatttatgttatacttcaatctagtataccatccatattgtaattttgtcatttaacctaaaaatgcctcttataatgtctttttctcctgtagcacaggatcctatctagttgtcaagtttctttagccttaaatagtctcgaatgtttccacagtctttccttatcttttatgacaataacatttttgaaaaatacagccctactaccatttaatagaaagttattcattttgggttgtctaatgtttccttgtgattaggttcaggtcacacactatcttaggatatcacaattggagatacacaatgtccatcttccctcattggtgatgttaatttgatcatttgttcaaggtgttgccaattttttgaaaatatagttattgatatttctcttttaactgacagtcagtatatgaagtatctttctctcatcaaaatacccctccctagattcagtatccattgattatttttacccatttttactacgatgatcacaaaatgatgatttccaagctccagcactccttccatattgattagttggccctcagcattctaatgccaggaagaaacctcccctctcctgtatgtctgcatgtatgtatgtatgcacctatttatcaatcatatctatctatccatctatctaatctatatactcaataaatgtgtctacctacctaatgaatctaatatggatattgattcatgcatttctatttttccatgatttatcattcattactatccttaatcattttggcgttcaaatttttagaaatttggtcagtgagaactccttaaagctagttcctgtgtccctgtgacatcctcccaccatgttttaaagcactttcttattttcctacatagtgagatattccaggttcatcttttaccccagttccagccctggaatatgaaaagtcctagtttctttaattgagaaatggtagtagagacaaaattatgggtgctatttatacttattattccaggagtatatttgcttcttggctctttagcaaacagagctaagaaatacatgcatggacatatatatgtacatgcatatttacataaatatacatatgcgcaaacctagatatgcatacatgcaggtgcatacatatatgttcacttaaacatatatacacacatatatgtacatatttagagatatctccagttccaatccatcctcaggattattttgtgacttctcctgtcccatagtatgtttgtataccttctttcacaatgagaactttgaccctcggtatcatttacacatctactcttttggcttggcacagtggctcacagctgtaatcccagcactttgggaggccaaggcaggcagatcacttgagtcctggagtttcagaccagcctggaaaacatggcaaaaccccatctcaactaaaaataaaaaaataaaaaattagctaggggtggtggtgatcgcctatagtcccagctacttgggttgctgagggaagaagatcacctaagcctgggaggtggaggctgcaataagctgtgatcacgccactgtaccccagcatgagtgacagagtaagatcctgtctcaaacagaacaaagcaaaacaaaaccatttactcttttgttcagttctacagtatcttaaagtacattcagaattgcttcactcaaacactatgataggcaaacctactaaaaggagtttatcaattattttcaattctcccccaccacaagtccaatctgaccaaaactaaaggtagtcacaagttgtgttcataaggtactcaaaatagtttgttctttattcccttccagctagttatggtattaatttgaaatataattaggttcatttgtcagtttgctttcagttttagggttctctcctttacatttttcggctttaatttaatttgggggttatactgacattttattattagcatgcatccgaaagtcaaatatttgaaaatacgtaattagaaaagtgtcactctttctcatacttttccatcccacctcgcctcacactttgtaggtatccaatttcactattttccagtttatccttcttatgttctttatgtaatgataagcagatatgtggctatttccttacttaccctttttcttacacatgctcatttgtatctcgcttttttttacttataaacatctctttgaaatcattttgtatcagttcacaaggatcttccttacttattttcaacaactacataatactccattgagtgactgtgccatagtttattcaacaaaactgctctgctgaaactttctggaagttccaattttttgaaatctcaaatattgccacaataaatatcctgttcatgcatttttttatatagttgtaggtgctcctagatgtggctctcacaaattgtgatatgataaattgtctttatcatttagattgaaatattttataatttttccttgtgatttcttatttgaactatagtttataaatgtatagtttaatttcaaaatatttacttttattggtttcaaatgtaattatgccactgtcatataacttaccctattaccctataagatttcaaacttttgaagtttactatgacttgtttatgatatttacgttatatggtgtatcgtggtgaacactcctcgtacatttgaaaacattttgcagttattgggtttagtgttctataagtgccaattaggtccaagcagtttactgtgtcattcatatatttcatatcattgttgattctttgtgtaactgttttatcaatgactaagaagagtgttaaaatcaactctaatagcagatatgtctattttgattttagttctgttatttttttcttcgttatattttgaaactctgttaagtgcatatccatttataattgttatgtcttcctcacttattgacccttatatgttaaaatatgctatttttcttatccataatactctttatcttgaaatttattttgtctaatgttattttaccccctatatcttggttatggttagtggtgtttgcatggaatatcttatctttttactttcaacatattttgtctattttctttttttatttgttgatttattttattttattttatttttattttattttattattattatactttaagttttagggtattttgtctattttcaacctatgtgttaacctattaaagtggatttcttgtgagcaacatgtagttagttgcgtcttttcttatcttttctggcaacttctgtaacttattattttgttttctgtttaactctttgttttttgaggattatgcatgtagacgatacgtatagctctagttcatttattgtcattgctctgtaaaatactatggcaggaatataccaaaatctagttttccattctgcttctgggctgccacttgggttgtttatgatttttcatatgtacaaacaatgccaaaagtatacagtcctgtgcatgtcttctacgtacatgtatgttccaagacaaaggtaagtgtacaattcctagatcttagaatatgagaatcatctgtctttaccatataagcattcactgatatgggtaaaaaaaaaatgcagttttgccagtttatactttcatcaagcgtaaatgagaatttctcttgatcgatatcctttccaacacttggtaacgttacacacacccaaacacatgcccaccacatgtgctatctgacagcttttaaacggagtctcactgttatataaacctgcatcttttcatgtgtatattggccattaagccttcctcattgaggacttgctcattcatatactctactctcattttttaagctgaaaaataaaaatttggaggcatgattttcccaagatcacacagcagtcatggattagacatgagtccaggtattgtaacactgaaaataagtttttctctctctttatctatctatcgtgatactgtatagattttatgactaggtatatgcgtgtgtgtgtgtgtttgtgtgtgtgtgagagagaaagagagagagagagatgagatgagatgagatgagatagtatgggatagtatttctaaaattcgtattttggcttgaggttttcagatccagttctaataaatagaacatccaagacaaatcacctctgatgtaccccttccctccaatctttttcccaagtaaaataaaaataaagtgaaagaaaatcaagaacaaccttaaggagatgctctgagaagagagtccccagtcttgcctatcttatagggtgggcttatgggctgaacaaacaaacgtgggcatcaagtcagccccagcaaccacttttttctctctttctggaatactttctaaggtattgcccagattaggatagggagccagggcgctggcctaattcctaaccaggaacaactctgggaaggctgccttctgtgactgccctaggaaacctagctcttcctcgccctctctctgcccctggctctcccagcctctctgctgccgctgcctcaggattgatcattagcctgggattagcagctgtgccagcagcaggcgggacaaagccctgctgccctgggctgtagctgcagagggctggctggggagggagggctcagctgcccaagtgccaggcatatgtcaaatccaatttgggagaggatcttgttaagccttcgtattagatgacatcctccttaaaaaaaatcatcggttaggaaggctttgcaatgtctaccaagcacccatgctgaggtcagatagtgtttcctgtcaagaatagattctttatatcccatcggtccctgggttcaaggggatttgattagtcagatatggcttacctataagccttgctggccctaatcagtctctgcctttcaaaagctttgtgactcattttttgtgatcatatcgtccagcatcttcactagtaaagggcacagggctcttttcattcccgtcctgttaccctttcaaaattataggcacaagccagacacggtggctcatgcctgtaatcccagcaccttgggaggacgaggctggtggatcacttgaggtcaggagttcgaaaccagcctggccaacatagtgaaactctgtctctactaaaaatacaaaaaagttagctgggcatggcggcaggcacctgtaatcccagctactcaggaggctgaggcaggagaatcactcgaacccaggaggcagaagttgcagtgagcggagatcatgccattgcactccagcctgggcaacatagcgagactccatctcaaaaaaacatatatatacacacatatatataatagtatatattatatacaacatattatataattatataatataatgtatatatattatattatattatgttatattatatatacaggcaccaaaaatgataaaacagattctgggtctgtggcaaaacagtacttttatacatggcttgtgacagcataaattgtcctaacccttttgaaaagatatgttacagtaggtgtcaaaattcaaaagtatatgcactctgacattctacttacggagttttcccattaggatagtgtaactaaaatttattgcctatctattctgagctaggcacgttattctgctgctaattctgcaagtcaagcctttgacacttattgtttttgatgaggaaattagaacaatggctaagtgacttacctgatatggcaccattattataagggagaatctgcattcaaatgcagtctgattccaatcccgtttcttctcctacaaaacactgctttgggagaaggatttctatgtatgaacatcttcactgcggcattatttatgatagcaaaagctgagaaaaacaagtggctcataatagaagaatgttctagtaaattatgagaatttaacccaatggattatttttccatcttataaattttagtgattatttagtgattttgggaaaagcatatcatatatattaagtcaagataatagaatacaaaattatttctatataatgattataactatattaaaatgcatagccatatggaaaaaattctcatgggaacttggaatataaaagacttttttttaaggtattagtaactaaaagtgatttcccaaaatagtcattgttacaaagttgtatttgaagaaagacactagtcttagtggaaagaataatatattcagaatagaagagaccaaaatctgaatgctatctcttccacagtctaaatttatgaaactgagcaacttccctataatctctgagcctcagtctttttcatttgtaaaacagtgataatatttacctcataggatcacagtgcaagttaaatacattagagtaccaacaaatactgaactcatcataataaattcaataacaaaaaaagacatccctgataaatgtattagctaacaaactaaatacaaatgatgatccttctcaagcttccaccacctccaaagttttctgcagattttcagacgcaagacaggccaaaaaaaaaaaaaaaaggaaaacttcagcccacacacataagcatgtgtatcacagggcagccaagggagatggctaagtacaagaaactcactctttgaccacataattcttagctgaaaccagccacagatcaaatgcttcaccaacacggaatgccttatgtattaatccctaggctctgcagtgaagccagcatgtgaaaccaacccttccctggtcctctgggcatttacaagataaggccttgttacaggctgggtagtgatgctccctgaagcctcttaggatgaacgttctcactccataagacattgtaagctcgtgtctgtgggatgttgtgggatgatttctctagcttcaatattgctaagagtacaggacacactcaataggatgagacctattaatgttacttcatggtcttatggctgagcagctgtactctctaggcttgggttgcgtcaatcatgtccctatttcccaaatcaagagtagggtcaagtagattggggagtgagaaagagtggaaggcatcagacatgaaacacattcatcaggggctaagcaagcactgatgggtttcaagtaaccaacagtattttgatcacagtatcttcactgtggaatcttcatctgggctctgtgcaacaaaccccaagtgaccagtgaatgatgaccctttggctggagtgagtagactgcaaccccaaggagaggagctctttgcttccagacattgcccgaagagaggggcgaaggaagctggaggagtggggtggagagagaatattattgagattactaagtgtcaagtatgtgtcaagaataaaatgagtcatgcctgtaatcctagaactttgggaggtgaaagcaggaggattgcttgagctcaagggtttgagatcaggctgggcaacatagcaagaccttgtctctactagaaatcaaaaagttagttgggcatggtggtgcacacctgtagtcccagtttcttaggaggctgaggtgggaggacaacttgagcccaggaaatcatggttgcagtgagctatgattgcactactgcactacagcctatggcaacagaacaaaactctgtcttaaggaaaaaaaaaaaaggaagaagatgaaaattaagccaggcgtggtgactcatgcctataatctcaacactttaggcggccaaggcaggaggatcgcttgagctcaggagttcaagcacagcttgaacaacaaagtgagaccttgtctgtacaaaaaaaaaaaattgccgggtgcagtggtgtgcacctacagtcgcagttacttgggagactgaggcaggagaatcacttgagcccaggagtttgaggctgcagtgagctatgattgggccactgcccttcagcctaggcaacagagaccatttctctgaaaaaataaaaatacaaaaagaataaaatgagcttgctgatttagtactcacttcctgctaggaagatacagttatcctcatcatttaaaagatgaagagcttgaggcaccagatctgcatttagtcatccatcgtctatttgttgagcacttactatagtctagaaactgcctcagaggagacaggaaggatcatcacaaggtggaatttctcatttggtgcaaagctagttcatgaggttcctcagaacacactattccctgaagcagatgctcttagatcaagaagaaattggcagtgcagttgtccaagctggctgatccttcctgcctgcacctagttgaatgaaacaaacctgaacaggattaggaaaagtgctttaaatggttgcactttaagccatcccttagcacaactcttggctcatagcaaagggaggcacagctggcattcatcaactgggaggacagcatgttctgtcccacactctaaaaccaagcaggtggctctgggaaggtctgtgagggtgagagagagagacttctgcatggggctagcccttttcccatcaagtaggaagaacatgagatttggagcaaggacaaggaaaaaataatacccaattgaacctgactctgccactcacttgctgtgtgtttttggcaacattcctaacttcttagatccacatctgcagaaaggattttttggggggctaaaagcaagtcagggatgtactacaatttgcccaatacctggtacctagcatcattctttttcccagaataatgtttctgtgttgaaaacagtgagggttaagtgttatcctgagaagtggggagcaggttcagcctatgatgcaaagggtggaggcacagacacagccagcattattccccagagctcatggagcaatcgcctggagccaccaaaagctgtgggtaagaggaggcagacataaggtcaggaggcagggcaattagttaagacagtgaagtccagcaggtgccaggacaatttgaataattctgtccagctctgactgtatagcccagggccatgtctaatgagcaccccgtgattattgtcttgtagaatcgggtacctagagatttcaaggaaccacttggaacagagaaacaactttccctccgttgctcatttcagtgaccagtaaccttcaaggtcaacacattctttagagccaactccattttgcttttgtttcagctctcttctcatctaattctcttggggcatggaaaacaactacttgcttagtcaccccattgcacaccgactatccaagtggatagcacagtcatgtgctacattagccaactaacctgtcaacaattagagcatgtagtatcctacattaagtgttttggatggtacaaaaacaaagacatctgtacctatgtttaaggagctttgggaatctgaattgcagtgcactagaactcatgtttcccaatcatccgttcagtactagaatctccttaatgttgcccatgacaagtagtcactcaacccctgcttgaattcttcctgggactggaggttgcctaccacccaaagaaaccatttcatatagaccttagtgctgagtatggaggacagtggattctcaacagatgttgaagagatgaaggccattaattgatggctttaattgtttttcattcattcactaatccatttgttaacactccttctcttaacttctattcttgtgtggcttggagctgctcaaatatttgcaagtctaaccaggccgaacattttcaattcctccaaatattcctcatatggctttgttcctagaccctgtcctatcccacttccctcttctggataatgtttcttacaggatgtggcacttagaatttaacaagttgaaaacaccatatttcagctgtaacttgaccaacactccccttattcaggtatatctgcttttatccaatagcgcaagagtacatataactacataagtgaaaatgtgttccaaacacatataacaattttaacagcagataatggggagaaggctgatgggatccactctatatgggttttgaagccccaaactagagacacaaacccagagaagggcaggaagaaagggaaagcatatgatacccaacatggaacagcatgagattaacacccaaaccacttggtgtgagagagtgttgagagtatagacaactcttgacaaagtcacagagaaaaccgtttgacctttggtctcctgcagtcccttttctgagcacctttctccctctcaattcaatgggcaaggtggactgaccaagattacagttgcattgacctgagtttgaatccttgttttaccagtatgtataatgtcagaaaaatgcctttctctctctaggcctctgttttttatctgcataatgggaacaataatgtctccctcctcaggtggctattaaggaaggtaatagatagaacctagcacagggctgggaatttacttcagtgtcagtttttgcactctcccatgtgagtctccatcctcattagaaaaccctgctctgagtaaaggctttatggcagtgattcacccctcagtgtaggccagtgaggtggtgtaattcctgctggagtatgtctgctaaggtgttaaagaaatcttacattctagtcagggggtggcagtcaggctggtggtggcattttctttcatttcttaccaatcagctttcatgaagcctctgaaaaagcttctgcctgctctctctctccctagaccacctgtctttctccctaggggtgagatttaaaagatgccacccacaagcttgtgattgttgttagtatgtcttacctaaagggtagcatttcccatggcatgattctgttaagaatcttgggcctcttggcagtaataacaattcctgagactccaaagaattccttctgagactccgataccttttgcaagtgtgtgtggggggaggagggcgtataatatgtgtgtgtgtgggtgggtgggtgtgtaccaagtgtatgcaatgtgaaccagccattggttcaatgtgtgcacggaaataagtatgtgtagtgtgtagcatgtagtatgtgtgtggtgcatgcatatgatgtgttctggcagagaatatgcacctggaaatatgtatcgtgggtttgtgtatatggaaagtgtgcacacacacaggttactgtcagactccactgttttccccagattcatcccttcaattcatcaatctgtcaggatttttcattcatttaaccaacagtctttatataacatctatatgggctacacagtatactagggaagaggagagaaagatgaataaggtcttatctctggtggaaaaaagatatataaacagacaaattatagaacagcccagtttgtgtgacccacatgtataagtgagtacagccagagcacagggagggcagtgagccattcagagaactcacagaggaaacggcatatggttggggttttgacagatgaacaggagtttccccaatgttgaaatggaagaacaacatttgaagcagagagaatagcctgtgaaagactgagagtcatggataggcacctcattttgagggaaactttagtacctgaagcatgggtctcgtgggatgtggtaccaggagaggtaacctagggaacctggggtccagactgggaagggctttagttaaagagacgtgactgcaatcatcccaacagaagatgctgaagtcctgggctcagaccatagctgtgggggtggagaggagaaaggctggattcaagatatgtttcttagatacaattggcaggactggtgatggattatttgggggtggggccttaacaaggagggaagagttgaggatgactctgaggtttctggtttggaagatccactagataatgtcatcattaaccaagattgagaaaagaggaggaggaacagattccaggggagattagataaataacagcaaggagcaaatctccccatcagcttcaaggacattacactatccagtcctcagaatgaaaatcagctccgcagtgcctttgaatgccattctctagtgcaacttcttagccaggaccttggagaattcctgtaaggcttcaaggctcttcttctggtgtcaggctggggggtctcctggctcattttcatgtgtcatggtagttaagcatagtgattaagagcttaacctctggatcaggcagccatgggtttaaatcttccactgtcactaatggattgtataatcttagaaagtttacttaatttttctaagcctcagttttcttatctataaagtgagtatactaatagtatacacctcacagagctaccagtggaatcaatgagttaatgtatgtaagaggctcaggatggcatctcacacataataataattcatgaaagagaagtgctattgttagtagcatgttttttctttttctttattttctttcatgtgtatgtgctgggagtggggttggaggagactattgatcagagaaggaaacaaagaccaatcttctacaattccccacaccgacatttcttccagaagatcccattaaggttgatgcagtgcagtcaccatgcactgcccgttagacacacagaccagccacgttcttggccactatcagcagaatatgcatctggtccctttcctggatgtgggatggatttgtgattattgtttttggatctatgaccaggatccctgtcctggaacaaaggccggtccgggttaggaaataaagcaagattatctgaccctcttggccactgtgttccagccagctgagtcactccttccccaacacaggaggtgagtgtgtccttacatctctgcaggtctcttgtgagatgtccagactgtttggctccaatccagggaacgggtgctctaaggttgtgctgtccaagcctgaatttctggagcagcttcaagtggccttgagcatggataagaatcagtcctgccctggctgtgttcactctgctgacagacagatgatctttcatgatctttcattgtattacatagacattttctcttgcccattccataatctccattttggaggccaggaaagtgtggcaagagagatgtttagcttgggaacagaaacggttcatcctataagctgtctccatcctcttccccagtcatggctactcagtggagcccacagaattccttctgggctagtatttcaaaggaagcaagttttaatcaagtgttgaagaaagagagaaaagtaataaagggaacataatagaagggttatgggctttggagtcacatgacatcgattcgagtcccagctctgccatttgccgtctgagcttgccatgctacctaactctcccaagcctctgtttccttacctgaaaaaggggaaaacaagatctcttctacaaagcattattgtatcaagtgagacagcataaataaaaacactgctttgttagcctaatttttatacaacatgtatacagtttgatgtctatttttacctgttaaatgcattatgctcccaggttaatgcttagaggatctcttcctttacctcttattttgtgtgcctccaaagccagcctccacaaccccatctcctcatgcctgaatgtgactcattcttcaaagtccagctctaaagtcaattcctctatgagcttccctttctctacacagacacacacacacacacacacacacacacaaacacacacacaaccagccctggaagagcccactccccctctctatgaattcccacagcaatttatcagttcattccttctgctggttcatactttctaccttgtgttacaactgtggactacaagctcctgtccagccacaattcccgtctgttatgattgtaaactctgaggatgggatttgtggacagtttgttttgaagtcccccatggtgcctgacatagggtgagcactaacgtatattatccaattaatagacaaattaacattcaaagccttggttaaccagccagaacccctcattccacctgtttttctctcttctccagatgcacctcagaacagcaggcaggctcattcctcattcacacgatttcctgtgcacccctgacctcaaagcaattgcagtttttgtcatgaggtttcttgagctccatgctcccattcaagtactaaccagatttgcccctgctttgcctccaagatcacgtaagatctggcacgttgaaggtagtatggccatagatttgagctcctttctgatgacaattatgggggaactggataacaaagtcataaggatatgcagtacccaactacctgctagcggtttcacttggtatcccatgagagctattaattcaacacatttaaaactgaactcctcagccatcccacctctgcctctctctggtgcccactgctcctcctgcttttttcccagctcagtggaaatctgatacagtatagagtgtgtctgtgcacacgcatatggctcatttagatgagatattagacttagagttgataatggaatggttaagactttgggggatgttgggatagggtgaatgtattttgcacatcagaaagacacatatttcagggggtaggggagaagaggatcaattgttatgggttgaattgtatcttcccaaaagatatgttggagtgctaaatcgcagtaactcagaaggtgactttatttggaaatagggtcactgcagatgtactagttaagacaaggttatactagatggagtaaggtaggaccttaatgcaaaatgactggggtccttcttttttttttttttttctttttttttttttttttgagacagagtcttgctctgtcacccaggctggagtacaatggcaccatctcggctcactgcaacctccacctcccaggttcaagcgattctcctccttcagcctcccaagtagctgagattataggcgcctgccaccacgcctggctaattttttgtatttttagcagagacagggttttaccatgttccccaggctagccttgaactcctgacctcaagtgatccacccgcctcagcctcccaaagtgctgggattacaggcgtgaaccaccgtgcctggccagtactggtgtcctcctaataagaggagaaatatacagggagaaacagccatgtgacaacagaggcagagattggagcgaggcatctataagccaaggaactccaaggatcccagcatcaccagaagccagaagaggcaagaaaggatcctccagccttgaaggaaaagcatggccttgccgatactttgatgttagacttctagcccccgatctgtgagacagtaaatgtctgttgttttaagccacccagtttgtggctttgtgatggcaagcttaggaaatgaatgcacccactatccttccaaacactggaaaggaacttcgcctgtactctcctgtcaaccccacaaccacccttgtcccagtattacccctccctcgtctctcccatctgccttctctgacccatttccaccatcacacccttagttcagtccatcctatcttctcacatggagcattagaaaggccttcaagcaagtgtccctgctacatattcaagtgccctccaatctacaacccacgctgatgctggagggacctttttgaaatatcaatctcatcatgtccctcctctgattaagaccttgaaatgtcacaacagctcctccgagtcttcaggacattgacaaaggagtctaagctcaagatacttcatgatgaaggctgtaaccatcaccctagatcacctcctgcccctacattcccatgcaccctttgctcccagcctactaaaatactccaacatcaaatgatgccatccatctaaggaacttcacatattatcatcttctacctggcttctcttgttcacataacaaacatttactttcttcagaattagttcagctatcaactccttcaggagtcttctctgaaccttctccctcctatgatgcccttctctgcacttttagaggggtcccctaggccacagtacatttctaccagggcactcagtgctttgctgcagggagccatctctgtatgaccaaagcccatatgggcacagagcaggtgcccaacaaatggttgttatcttttatttatttcatctgttatatttattttacttgttgccttttaatacttatttgtattatttggggccagccaatgtgctaaggacttgcttgcatcatttcatttccttttcctacccaccctgtcagtcaagcatcattatcttcctggtattcccaaggaggctgagtctcaacgagattaaataagtgctcagcacacccagatagcaagtggcagaaggggcacaagggagcgagggtccagcccaggcagccgactccaccacactaccagaatgaatgaaggaatgagccaatcatgtcaaagtctcgcaattaaaagttattccctgtggttcacggttcatcggaatgcaaatggagacctccccagttccacctgccacttcgatatcgacttgtttctcatctagagagagcgagtctttctcccatggtcctcatccgtcacacccagctacatgtgtctgtgtcaggggaggagaggaatgaacacaaatgttataaacactagcaggggcaaaagaggagctattttatcttctcagagcagagcataaaaccatagccagtgctgtatcccaagctttgtttacagtgtgtagtggtgaacagagtccaggcaggggaggcaccctcccccactcacacccaccccacaccttgttggaggcaaagaccaattaaaaacacaagctgctcagggagagataaatcaattttcatcagagcagcgctcctgacaccaccctgacaaatcaatatctttctccataatggagtcactaaagctgcaaccaagtcactgggaaacacaaagcagcctcataaagaatatcgtcaagtaataaaatatccaaatctgaatttcaattatccactttaaagggcacactaatatcttcagtagggaagtccatcaaaaattcatggaaccaggctccaccactcattcccagtcaacagctctgtgggcatctagggttccaattgctccaagttgtcggaagacaagtcttgcccagcctatgagaagaaggtagaatcccctagaacatggccctctccaagggtgataacaagctctgggcagacaatctggtctattaagattctctctgctggccctggaactagggagaggattcatcttcgcctggattctaggcagggcaacgaaatgaagctgctgagatcaagcagagctggcaccattacccagaaaccccacaggaacccgcccaacccagtcaggaggaaggcttcggctccactgcaatgtcatttcctgcttccctatcacctcctgccctccctttgtagactaccagggagggagaggggccagactcctggggaatggcagccagctcctggcaggtacctcttgctcagcagtgggggtaccctgggagtcaccttgtacaggcacctacctcttgctttccacctctgagtcaccatgacagtgacaatgactgcataggtggtgtattggctaagagcctggagtctacaaccagatagtctaggtccaaatccagcagctgtcacttacaacctgagtggtcttgcaagtctcagcttttccgtctgtgaaatggaacaatggtctcctgcttcttaggatcattgtaaccaaaagcaacctttactgaaggcttgacctggactagggatcatttgaagctttttaaaaatagtaagttacaggctgggtgtgctggcttacacctgtaatcccagcagtttgggaagttgaggtgggcagatcacttgaggtcaggagtttcaagactagcctgggcaacatggcgaaaccccatctctacaaaaatacaaaaattagctgggtgcggtggtgtgcatctgtagtcccagttactcgagaggctgacacaggagaatcacttaagcctcggaggtggaggttgcatgagccaagatcatgccactgccctcccgcctgggtgacagaagtgaaaccctgcttcaaaaatgaataaataaaaatattaaattatataatcttcaaaacaactgggtgacattggtattatttttctcaccattttacagacaagaaggttgaggcacagagattatgtaacagaaagaatacaggaaagcacttagcacagtgcctggcaccttgtaaaactgtaatgggtgacatcacttactattactatcatatttaatatactttctaagcagtttaaaggctgcttcacgcaccgaagcaccactgacctacacaatagcattttaaaaattcaaaatactacaaaataaccactccaatccatacactttagtactgctagggagatcactctaaaacacacatatggtgataccacttccttatttatggctcagacttcttaactttgcagcaaaagagcccccttaatctgatgggtttgcctgttcagcttcagttatcatcccacttacagtcagttctggtttctgtaacagaataccacagactaggtggcttaaggaaaaataaacaaacaacaacaacaacaaaaacacatttatttctcacacttccaagtctggaagtccaagatcaggatgccagcatggtcaggctcttcttgggggcccccttcccagtttatacgtggctgctttcttgtgacattcgcacatcatggagagagagatctctagcccctcttcctgtaatgacgctaatgccgtcatggggtctccacactcattaactcatctaagcctaattacctcccaaaggccacacctccttatatcatcatattggggattaggctttcaagatacaaattttgggggatcaccaacatgtagtccataaaaatcctcagtgttccccatgtcatagatcacaggaaatgtcctgttcacccacacatcaggacttctatgtatgtcatctctgcttgtagtgcctttccttccctattctggaaaaacgtcttcccttcccttccagagacacctcctccacaaagccttacctataccccaggacagactcatgtccttcttcctccgtgtccccattgagacttgcatgccctcaccacagtgctactgacacacaacagcactgtatgcccagtgtctgccccccgcttcacaggccagcatccgctgaaatggccaggccttgtcattagtttatcccaggcacccagcacaggtcctggcacacaatgtgtatacgtgtgcgcatgtgtgtgtggtttatattgtttttatttctaattaacttgggtgcagatgatgaaacatcataatcttgatcagaagacaactgaaggtcttaatgcagtcttggggacagcaccaattccacagaacccactctagccagtgtaatcagaaaagtaatttgttagaggatgttaggtagctcatggaatctccaggagaccagagaaccagtctcagaagggaatagactgaaacgatacccaaatgacagtgccagactgtcccatgggatctctgtggctaccatctctgggctggagcacttcagatcctctcagtgtattttaataaatgagtaagacgatctgtaggaatgattcctatcttataaaggaggaagttgaggtgtaacatgattatatgaattgcccacagccccacaagtagtaggttgtgggattgtgttctcatgcctagatgtctccacaataccacagccgctaagacatggtttgcgggtgagctggagcttctgaaactgaggatccaggtacgagctcagataccaaatcctgagctccagagagcagccagagggcagggaggtaactgtggaacacaggaggccatgccccccatccacgtcactccccttggtcacacggctatcccacatgtcacagcctccactggagcggagtgggactgtggactaagctttctgctcaatgaagtgtgaatgcaagtaaagtgggttaccttgggtaggcacattcaagagctggtgtgtctcctcccctcatctcatggcaagacatagaggacccagtggaggactgaaggctccaggggaagacagagccattatacaggaagaggcttggccctgagctgtcatgaggaggactgcctatcaaagccttgattggattgtgatgtaagcagaaaggaagtttattgtgactaaaggctacaccagtgagacttaggcatcatctgtgacagttattagcccactccactgcctcatactcaaaaccaagcagccaagcctcattatcccacagcctggggtggtggaggaaagtacggaataaataaagcaccccagaggtgagatctatgcctgcttttcccagactccaccagcctgcctttcctgcatggggctgtttagcctcagccttctgaacatgccaaggacctcagtcctgtacggcaacatcagggagaacactgagagatgttccctcttctccacttctctctcagcctccctagggagttggctgatccattacctctcatccactgtcaggacagagctaccaactcttggtcagcagtaccaccggcctgctgcttagagcacagatgaggttctctgactctgaacgaagaggcaaggcaggcacaggcaggggatggaggtggatgggaccacacagtcttctcacaatttagtgggcacatgagtcacctggggaccttgttaagctgcagattccgtttctgcagagctgagcggggcctgaggcgctgcatttctacccagcttccaggtgatgctgatgctgctagtgcgtgaaccatgtgctgagtagcccgggcacgtccctggaaaatacacatccctgacagggagcacaagcctcttcccagattattccaccctccaactcaggacagaggggtgcccttgaagagtgtctaagaaattaaggtgggagggcccatggataagcaatgaagcagtctgcctgtaggctcccagtaagcgtttgcatttggcagaatccacagctgcaggtaacagtcacacaactcaaatcagcttcagtaagagggggtttgtttttcgttatgagtaagttttctatgtgaaaggccagggggtcaaaggaggcagtatgagcatcggggcttttcaaactagaaatgaggacttcctatcacaagatctgggtctgcctctgcatctccctgcctccctgccttgcccagtctgtctctaactctcatgattgctgatctctccttagcttcattctgaactctataaagcaaaaaacaagatggtcttgggtttaccctccatctatgacattctagaatttgttctgagtccgtaaaacaccaggctccagacaatgtggcccccacagccagagtttcaatttagttgtggatgcatcccctttctcttcccagaccatcagcctcttcccatttccaaaccagtcatgcagcaatcaatttttctctacgtataggtagcagaatcgagagggaaggcatggagtgcagggacccctcttctcagcctggacacacactctctccctcagtggggcagctgggggcttcagctcccctgctcttcctgctgcaggacggatgcaacagctccagggaggagtccgatgccacctgagccctccacaagaagggagggctgaactcaagaatacaagaaactgtcccatgcaaggaaaagaatatgataaaagaggaggctgtacaaagagcaaattcagggatccctggactggcactggctcagagccaacctggctttctctatgctgagcatcccgggccttgggcaaaggagactgggcctgctagatccatgtgtgagctctaccttattctagctgtgtgactgtggggaagttactcaacctccctgaatctcagagaggcaaggagagcacactgacagccacaaatatataatgatgatgataccacatcccacgggtgcctaacaccttgtacaatcttaataaatgtttgagaaaaggagaatgaagaaaagaaggaggtagaggatgagaaaaagggaatcaaatggggagtaaaaggcccaggtcatgggtgtgaataactaacacatcagaagctgtgagggtttattgggtaaagggaggcaaagtagtcttatcaaagtggcccgtgggattccactctgccacaccttgtccctattgagaagttcagctcactgaattcccagggaccccaggtgcagggagcctcataggacctggcaaagcaggtgaagctgttcttgtaatgcatcaagggaaccatgaacctccctggtcccactgtgcctgccttgggccacccgctgcagtgtggttcactttcccctgcaaaccacacttattcaatgtgatagtagaggaggaggggcctgtttatgtcactgcatgacctgagggatgtcacttaacttccaagagcctcagtttcctcatcctttcagtggagaagggaaaaagtccctgctctgcctaccccacatttatgggagtagttctagcactagaactgtgcgctagataagcaagttattattgttactgcctccagcactctctttaaatgaagcatttcttgatgccgtgttactacatgcaaaaaagtcagcattggcttttttccccttttctacagaaagtttggggctggaggaagaatgaggttgtgtcagcagagggggtagtctcggtctagctcagctccagctgcacatcagagcctcctggggagctttaaaagttgccagatgccccagcgccaccatcagaaattctgatttaatccacctgtggttggggtttcggctagttatttttcatatcaacaagtggtttcttatattgagaactcctgggctccacagcagagggagtgaacatgaatacaccgaaggaagagaacactctaaagatcagtgtgcagagtgatgcctgaccccctaccctcgagagcacgggctcatgaactatgagaataaaaagcgtatgaatctagtttttaatagcttacatctactaaatacctattacacgtcaagcactatgcttagcatgtgatgtcctttatcccatttaatcctcacaacagcctaatgaggtggggactaggatcaccccacgtacaggtgtggaaactggcagagatgactttatatggtggaaccagcatccaagccccactctgcctcactctgaggccaaactctccacttgtacagcataacaagccttggaatacaatttcttttcctgtaaaatgtaagaattctggggaattattgtctgtcagaatcaactttgggaatcctggtaggacatgaccgcatttgatatacacacacataccacagggtaggaacctcttccacactcttaaagggccatgtcccatgttatacctggaactaataattcccaaaattattctctagagtgttaaaaggttcttggctaagaataaacatcactgcctatagtaccccctcatggagactcacagtacctgtcaaccacagcaaaggtgatggatgagaagtcctgccctgaggaaatctaagtagttctatttcaccaagatctttctcaagcttctttgtctacagaagccttttataatggaatacctaaaacagggcatactagtagctgcttccaatcttcttggatccccagatcaaagcttccttaaaatctagaagacggggcatcctattatcaatgaaccaagtacagaacaaaggctaaagctattgtcaccctccagacataccatgtcctgcctctcaagggggtccactgagctgggagggatgcacctgaaccagcaaggagctggcccagtggagcaggaagtactgtcatccaacagccaggtgagtccaattagagaacgataaagccaccatggaaacttgcaccttgccatttactttaaggctattgctctgcactcttcaggctatctgtggggtttaggagttaatattcatttgcacatcatgaaaggactaaattagagacatgaagaaagacagaatgctctgactgagcctgtcacacacttttcaaggcgagatcattagaggcagtcactgccacccatgacttcacccagcaaagctccttaaacccttaccctgtgcaggctccaaagataatgcagtgaatcagattcaaccactgctttccaggtgctgaaatcagattcaactactgctttcctcctcatggcttacgaggagatgcaacagttatgattttgaatccgtataaatggggatatgggcaagggctcaaaggagcctggagaacacagaacctatatctaactagtcccagtgcaacacacatttactggacatcatctatgtcccaggtgttgtctggacacacagggaaagagacaagaaagatatagtccctgttgaaagacaaaggtgtctttggtcttataagcttcaatgcccacacctttcctcaaacagagtaaagcatttcctcttccaaactctggaattcccttccatgatgcttctcacaccataatgaatctgttaggatgcgttttcccatctgggcagcaagctccccaagggctgggccctgcattacccatgtttgcataactagtgcatcccttagcaactgcctagaagagagcagatgctcaacaaatgctttttgaaatgaaaagatgggtttcaggggaagggaagcttatacatgaaattattatacggccactctgatgcctgcccttaggtaaaaagcaccaaggcatttattcaatggacagagaacaagtatttaaggaatgagtacagcgagtagggagagatcgagaaagccttcgcggaaaaagctgcattggagatggacattagcagatgagcagactttcaacaaaccaatgctaagggagagaaaaaggaggaattctgagaatgaatagtaggaacaaagctgaggggccagtggggaaagaaagccttcgggaaagagtgaattgtatattacggcagagttaggctttgcaccatgaagaattggaaactgagcctcgaaatgcagattggcaagacaatagagagccattgatggactgggacaaagtagtgacatattgagagctgtgtttcagacagggccatttggtcatgggaataatggggatggaagagagagaggagctggggaggaatcaattagaaataaccattctgagtaggccattgtattccctaaataaactgccagccccccaagctccactgcctaggccccagaagagtcattttggcatcaggatagctcccttcctttggccatcaggacctataaatagccacataaaggtttctgcccccagctcagccacagaggctccagggctgagctgtcaccctccaggacctgagcaaagccagccctgacttacccctgcctgggcacgcaaccattcctggggggaagccagcttgtggtctgctgacagcagggacatcttcctgagcctaaaccctgtccacaaatgctctagagatatttcacactctaccacaaaaacaaaggagaaatatttcagtctgtggctctgcgtgcctttcctttaatcccactgagacccagggtctgctgggcaggggccattgccgaggccccctgtccaaatgggaccagataaacaagaggccctgaaaggtctgagaatctggatcccagcgtgtgaaagcctgagtgctggcccactgacgaattaccttgggtctagcttctccattcttctctgagggacatttaggaactctggtctctcttggggcagtgggacggggacattttggaaacttttgtgacaattgtaggtgctgtcctggaatttgagacaccatctcttatgccctataagtttgatctctgggctttctacaggaggatcataatgcctctgcaggggacacaagaatgtaaagcctggctaacctcagctgggatctcaactttgccacttaccagagtatggcttcagaaaagtgctttaacttccttgagtttgaatctcctagtgtgtccggagttggttcctcccggtaagttcgtggtgtcgctgacttcaagaacgaagccggggacctttgtggtgagtgttacagctcttaaaggttgcgcagacccaaagagtgagcagcagcaagatttattgtgaagaacaaaacaacaaagcttccacagcgtggaaggacaggtagacgggttgcggctgctggctggggatggagtgcgagccgggtggaggccagcttttattcccttatttgtctccgcccatgttctgtttttgtcctatcagcgtgtcttcaagggtctttcttttttcaatcctccctgcaactggctacttttaggatcctgctgattggtgcgttttacagagcactgattggtgcattttacagagtgctgattggtgcgttttacagagcactgattggtgtgttttacagagtgctgattggtgcattttacaatcctcttgtaagacagaaaagttctctaagtccccactcgacccacgaagtccagctggcttcacctctcactagcctgcaaaataggaataacaactaccttccctaccactgtgggctgttgttaggtaacaagtgtgtgtgtaggtgttctttataagctgtgaagtctcaggtaaaaaatcaggccatacttcaaccatccatcctggaagcctgtgctcagctgacctctgtagacagtgagggtagggctccctagaagcacagtctcctccacagagggacctaggccccaatctaacccatcgcggcctgtttggggtcaccccaatttaataccacatctccctctttcattgtgagagggaactgagatgatatatgtaaaggcagaagagaactaccaagtatttattacttactgttagccagactcagtgttgggcatcaattatctgatttaattaaatgttcatactgactctgggattgataaatagatgtatgatatgatataaatacatatgattgatttcccattttagaagcaatgaaagggtatgaactcagatttctttgccttcaagcgtctttctttttcttggttattttctacttttatttttgtggtgtaggggaaggggtagtgtccctgggtgggtggggggcagagccatggcaatgctcggtaaatggttctttcctctcacctaaaaaaggtgctgggagaagctacacccctgggaatccctcatgctctggaattggcccagggtcaggctgtctctgttgagctggctacagaacatcagtgcattctcccaagagcagccctggctctgagctgtgggacagaagcccaggaggctgacattcacacgcatggccacaggccagggtaccagtgatgccaatgagcctggtactcacctggcttgaggagccttcgtagggcctggcaccagcaggtgaaacattcttgtgaggcagccaaggaaacccacagcttccctgggcctcactgtgtctgctaagggccacctgctgtatgcaaagtgatttctcctgcaaatcacacttatttacacctaaggtcaactaagtgacataggggttttacatcccaatttacaggtaaaccagtggttctcaactgaggacagttttgcccctcaggagatactgggtaatgtctggagctttgcagggtgaggggtgtgggaggagcacttccagccagggatactgctaagcatagtgtaatgcacaggacactacagtttgtccagcccccatcacaaagaatcctgtggctcaaattgtcactagttccaagactgaaaaaccctgagagaaggaaactaattctgagagatacttaccaagttcacatagctgatgagtgctacagtcagcttccaggtactgattctctaattcagaagccagcatcccttctttatatctgtaatggttaatgcccccttgaagtctgaaatgccccaaaaggaaatgctgtgaagccttctagagtcatgttgtagttggcatcagaggtttgggggtgaacaatgatttaattgcatttgaaatgttgtaaatggtcacttctctctgtgaccgccctatcaccctcaggcacaacatccatctttaagtactaatggtcttgtcaaatgccccaaagtccccagaaaggggccacattgtcctctcaccagagctggacagtcacctttaaccaagtccatccgggcaagttagatatccatgcctgtccccaagagaaataatccaggtcaagtccctggcaaagagtaaatgcacaatgcaggaaggagagaatggaaggaagaggaatgggagtgcagccatcgtagagatgaggctggaagcaccagcaaagcccaggccacaagtgccagagaaacctagaagggagactttgccctgagtccagtgatgagacatggagaagttctaggtcaacaagttatgtgattactttctcaatgccagtttgcaccacatactccagaatctgtttctatttgcgccaatcccaagattaatcaggtctgacctcaggaaggaaaccctctgcttatgaccactctcgtagacagacatgcagccagtcatttctaggagagggagctcacagtcaaactgcactccttactctgaatcctggggccaccccctaccttcgcccacccatacgtaggcagtacctccttgggccccttcagttcatacccctcactctgccaaaaatataataatagtaatgccttgaactttggaattctaattttctgaacagctatagccaaccacaggtcattactaaaagactggtgactgtagagtgacatttgagaccccacagacaggcttgtcagaactccaaagccaaatggaatgctttgctagaagtggaggctctttctgctagataagttggaaagctcttaattaataattccaaaacagaacttcacaacttctctgagttctggccagcaaagcccagccagcgatggcctggtcagcctacaccaaaaattgcacttgtcttccaactgtgaccaagcagtcccaaacaggcctgcctgctggcagctgaatcactgaaagcaggaacatggcatagaagatgagctagagatagaaagtggctgaggaccaagtctagggctagcatcttcgtaggagaagatcagtcagcaaacctagcactaggtttggcttccaactctccagactgctggttctcttgctagtagttttcaatcttggctgggcattaaaattaacctggtaagcttttaaagtcctgatgcctggacatcaacccagacttctctgtggcgagacccagacatctgtatttttttacagctccccaggtgattccaatgtgcagccaaggttgagaatcatagacttaaatcttccctttacaccttgattaattctttcagcacaggatgatgaagtttcccaccacctgaaatattgtttatagtctacagtcagtaattcacatcaaggacttgcactccacaaatatatgattaaaaggtgaaatatccactaaaggcaggacttgtattttaaataataataatattaatagtaaaacaatcaaacagaagccattcctttatagtatctttcatatctaaaccatcctcaaccaggatgctgccaatcattattctaaaaaaaataataatgtggtcatgtcattgagaatgctcaatagctccctattgcctgcgtcaatcaaaaaacaattataagcacccccaccaactgaatggagccctcttggccaagaggatcctggagaaacctgaaaaactagttcaggctgtcatgacagggcaggagtcagacaaacctagttataccctcctcctttggagtctaggcacagctgaccagcattaacattaaaacaaagattataagactgacaaagcagactctttgtagcaataacatactaaactccaacttgactctgacgtaacatcacatgacagcaggccctgaaggaaatctcagtattttaccccaaaatacattttctttgacttattttgaaatggccctgcaaagccatctcttatggggaaaatttgcattctgtagagaatccctttccccttccacatatcttcttgatccaggagagattttactaagagtctgacaccttttaagagacatttactatccattatctctgaagccccttacctagaggctttatctacataacaagaaccttggcttccacaaccctacttacttaattcaatgatttccttatgctgacttcaactcttgaggcaaagcttaattctttcaatcaattgccaatcagaaaatctttgaatccaatcatgacttggaaggcccccttccctttgagatgtcccatctttctgggctggacaaatgtgttacttacattattgatttatgtctttgcctgtaacttctgtctccctaaaatgtataaaaccaggcagtacctcaaccaccttgggtacgtgttctcaagacctgtgtcatgagccgtggccactcatatttggctcagaataaacctcttcaaatattttggagagtttggcttttttcatcagcacagacaatactcaaacatagtgggcctccctcacagcctgtctctggcctgctcatgcagcattgtctcccaagcccacattttgcatactctggacccacctgtcttgtaacttcattggcacatttccctggccctggaagatcctcacctgctcttttcacttgttatattctactccttttgaaggcagagctaaaatgctacctttcccatgaagtctttccaatccccctagaaggaatgaatcactctcgctccctctgcactagcttcccctgccatgcacagtatagataattctttcatgacagttctaattaaaattatttgtttgtatatctgtaaccttctaaaaatatgagattccactgagagcaggggacatgccatatccatcctggacaaaacagacaaaatgaatgaataagtggacatcaggttgaattaactgcacatggtagacatgtgattgatcctccacaattgagactttagccaatatgtgctatttgattccaagatgctttcccagcaaacagactgaattatattttcccaggaaggtagctttaaatccatcaactgaaatcatcattatccacattccatgttaattctctaggtttgttagcatgccagataattagtgtccctgtggaggcaaggcagagagcaggttgtgtggaggaaacatctcatttgtggaccatcaggtggagggctcctgggcacagtcttctttgtgtccgttgggtgtttctcccctctgtaagctccaccccacatcacttttgtcttagtctgttcaggcagctataatagaacactataaattgggtagcttacaaacaacagatttatttctcacagttccagaggctgggaagtccaagctcaaagtgctggcagattcagtgtctggtgaaggctcgtttcctgattcatagatggtgccttctagctgtgtcctcatgtggtggaaggaggggtgggtctctctaggacctctttataaggacactaatcttactcatgaaggcttcaccccccatgacctaatcatctcccacaggccctacctcctaataccatcagcttggggttaagattttaaaatatgaatttagtgggggacccaaacatttagacccctttgcacccacaagtcccaccttctagagtcaaagccagtgagctgttgaattatctaattatccagggaaatgcaaactgggagcagaagaatacgaaactaactcctccgagcagaagctcttcttcatgcaccccacctagaaaggcagaataggggagtgcacgagaccatgagctgtgagaccttgtcaattgccttcatcttttgtacctcagtcctcaatacagaatgagaggagtaaaagtacctccccgattgtgtccctgggaggatgcaatgcattaaaacacatgcggtgctttaaacattgcctggcacatagccaatgctcagtaaatgttttaccttcatcattaattcaggtagtttaattaaatgaaatccacatgtgaagttttcctttgctgccccacctctcccactcccactgaggagggtctgctgcatgaattccctggagatccacacatggaagcacaagcattgggtgccaattaagaaaaagtgccagggaagagacaagatgagaaggggcaggctaaatgattaggatccttacactggacactttctgagctgccttatgccacatggtcaatgctgtcactgcccttctccaccaaccctagtgcctgccacctctgctccagctctgcccaggctctggactagtgagagaaccacatctgagcaataaagagtcccaccatgggatatcacgggatccagaggagtctagttgccttgactacggctgagtggagtcctaccaaccttcgctctctcctttcacccacagtcattctttcagccattgttcgactctagtgaataccttatcccttgtccatctgagaattaatcatccctcaaagtccacctaggcaatgatcacacaacccaatcctctgaaaaccagtaattaaaggataggaataagcatctatcttgcttacataggaggaactgtagtttttccccagttgatgagtgaaaattcttccttataatacaatgtcagctgatacatgtagaatgatagaattgggaaatcactattttgaaacctctaatgaaattactgattcaggttcaaattttagcacaaactgaatgtttaaaggtattgtggtgtcatctgacaaatgatgggagatgatttgaagatgggagaggaggcaatggagctacctagcagttattatcttagccaaatgatcaaaaactagcatctctagtgaaagatctagcatctctattgaaagaaattctcagtttggacctgaatctcaccatgtttttaaatctaacttctactttatgaaaaatacagggaagggaggagcaaattaagtgataccacatggaaataaacagatagattcatatgtgggatcattgtataggaaaactggtttgttttcttccaaaagtcaacactaaacgatgtatgaatagcagcattatttataattgccaaaaaatggaaatgactcaaatgcccactaactgatgaatggataaataaaacgtggtatacgatgaatgcgtaaataaaatgtggtgcatccatagagtggaatatcatttgataataaaaagaaaaatatgaacacattctaaaacatgattaaaccttgaaaacattgtactcaatggaagaaatctatcacaaaatgcacatactacatgactgcatttatacaaaatatccagaatgggaaaatctatagagacagaaaatagattaatgatcacctagaactggagggggggggattgatggaaattggggaagcagggtgattgataatgggtacggggtttctttctgaggtaataaaaatgttcaaaaattcagaatgccttgaatgcacttaataccattgaattgtacactttatatgggtgaattgtatggaatgagaattacatttcaacaaagctatttttaaaactctgtgtgtgatgtggattgggggggtgagctttttcattaaaagagacaaaataaccaaatgcaacacatgaatcttgattgtatcttcaatgggtcttgaattttaaaagttagaaaactgtaaacaagttttggggacaattggggaaatttgaatatgaatgaagggcaggctggtagcagccagagtgcacacaaggagggcaccagagcgaaggagaagagggcatccaagcggaacagaagcccagtgggataggaagacgggcgccattcaagagaattgagtgtaagtaaataacctgagggtaacacgacacaggtttcctactgctagagaaagcggggaccaatatggaaggaggaaaagccagagtgaaccctgtgctgttagactggaataagcggcatctgtgtaaattcctggtttgagatgtacgtgtaaatgtagatgtaactatcctagctctgtccactgagaaggtctggaagcagctacaccctagtagtactgagcatacctacaactcagatcttggttctaaatagcatttcctgttcaaatgaaccaagatttgttagagaactggctgattaaagggctgaggaaggaaatgaagaaaatgaacctgaacatctagctgcacaagaaagaaaaaaaactttcaaaaaatacagggaaatgtcaaaagcacacaaagtcagctggaaggggttcccaaatgtgggaaaatttgagtttcaaaataaacaatattatcagactgtaacctattgaataaaatagaaatctatgagtctacaccaatgtaaataaataaagagaaaaaagagaaagctcttctgtatttcagaaaaccaactaataaatgtagaaaggatgatggaattcaaaaaccatcatttggcaaggttcattgtaataattcaagcaagagaaatcaatggatgataaaaccagagggtgagacagtaataagaaatggaattttacatagtctcaaagtatctccccagaagagacaccttcatcaagtgataaaacactatcagtattaggacaaatagatattgcatgcctccagataggctatgatgagaattctgcatcagttttgtgaaattccagccaaaaaatcatatctggtgtcttcaagaggaaacattgaacaaaccaaaattgaagatcattgtgcaagatgactggccttgaattattaaaaaaaaaaaatccagtacatgaaaatcaaggtaaaacagaaacattgtaagaataaagacagagtaaggggaaccttgacaactgggaataaggagtggtcctggatggactcctttagccatgaaggaccttagtggaccactgttgaacttctgggtgagggatacacaggaattcttcaaactagttttgcaacacctatatgtttgaaattgtttccaattcttttttaaaaaaagaataaaatttagctattatctccttttggaaaattttcagagcctaccatgtgttacctctggaccttgggcaaactttggttattttgtgtaaagtaatcttttatttactgtttagcttccccactaaaccacgagctccttgaatgtctagactgggtattattcttttccacttctctcgagcctagcacaatgtctagaacatagggaacatcagtaaatgtttgttaaatccatgtgctgggcaactcataaccctggagattggctggtagattcctggacatgctaagcgttggtaaattcttgcagacataaaactgaaatacgcctctctgcaaaccagagagcatctgtctgccctgcagcaatgagctatgtgtcctgcctgaaacagtgttctgcatgtaaggggcacattgcctgaaatcatagcctccaagaaatggtgttcttgcctcattgctctggggggaacaatggcccctgtttgtttaatctcagcccattgtggcagccttgactgcacagagctcacctgtgattcatgtgaatgtcacttgagctcccaggagtttgcagccataattcaacattttgttaatagccacttaaaatgtccctgaaatagctaacaggcccgggggaatgaagtattctgctaggaaatcattccaagaaagccatcttggcccaaactttagaagattctattacttccaatgccttcttgcactctgtgaaaatacaaatgggcatctctcagggacaccaaggaaaaagtggaaactgaaattacctacacatcatagtgggcatgctggagaccctgcccaatcactcctgctccaagagaggcccctcaactgctatatcccgtgaggaaggggaaatacaagggaacacagtccagagtattccaagaaaaaaacccttttcagagaacagaaagaaagagacagaaatacatatagtgctggattagaagtcaaaaagtttgtgcgtaggtggggatgacaagagagagaacggtgagaaaaatctcacataggttgaggcctactgtgctatgtagtttacaaattatttaattctccccaaatctaattaaacaacatactcagggtcatcaaagttgtatacaattgtagtgtataatcattaggtcattcagatagtatatgaatcaataaatagtctctctccagagctccagctcttattcactgccatttgcaaatttgtcaattacagcaaacttgggctggacattcaaaatcaagtcactgattcagaggcagaagttgaagctctcaatgctgacctcttgccacctgcttcctgaaacatatctgtttgctataaagttatcatttcttccacctagagtgagatttaaaatggagaagtggaggtggaaagagctagtacagcagaatcacatgcacacctggatagggatactcatttcctcatgtgagacccctgagcccactagttggcaacttggagaaatgtcaagtgttaccctggcaagaagagacttctccaggttctctacattcctgaagcaagtgctatagaatggcttggcactccacctgcacgttcccaagcacagaatcagggtaagagagaatgaagaattagtgcagactggcagagctggaaggttaggagtatcgtaattatatgcccagctctcagagtgactggcctgatttcattcagctcagccctgcacaaaaaaagcatgatgtcttcacagagaacccctaaagggaatcagaaagcatgaactctaatccctaatggtgccactttcttactgagtgacgttgtgccagtcactaagcttctctgagcctaacctatgttcaactgtgaaatagacatattggtacatgctatggtttgaatatatatagtatgtccccataaaaactcatgttgaagcttggtcccaaatgtgatggtgttgggaggtggtccctttaaggggtgattacatcattaagatgaattaatgtctttcttgctagactgggttacttcttgtaggaatgaattagttcccatgagagcagattcttataaagcaaggttgcctattgtgttttgccttttttgcatgcatctggttcccctcccatttctctgccatgttttgatgcagcacaaggctctcagcagaccttttcttttgatgaatattcaggtggtttctgggctgatgtcatgcatctttggagatgctggtttcaatgggagtacagccagaacactgggcgtcaaacttgtgaatgaaactttgccttttcagggaaagatgggcttaggatcttatagtcatgatgtttgcatatcacaagcaccatgtctctgggatctgggcatatgtctgtagtaggcctgactttccagaagcttccagatgtggctgctcagtgttgagtttcacatcctgcagaaccataagttaactaaacctctttttttttctttttataaattacccagtctcgggtattctgttatagcaacacaaaacagactaagactaagacaatacattttccactttcagagttattgtgaggatcaaatagcatcttagaaagcatttaggatataaaatcagatacctcattcatatcctgcttccaccaattacaagataagtgactgtaggccaattcttccacttttctaaacctcagttttttccatacaaaaaaaagatatgtcaactattatatatttcacttggctgttgtgaagaccaaatgaagtattccatgtaaagtgcatagaacagtgcctgggatacagtatgtgctcagaaaatgttagccattattaacaggttttgtaagctacacaatgatgaacaaataaaagaacttttatttgtgacaagacctgcatgtctatagtagcttaggctcaactataatagcaggagctgggtccctggcttgatcacagcctcattccccatactttctggggacttcctgatactacactgtcaatatagatttccaaaaaatcgtcttgctcctggatctcctgtcactatgttgtatcaccagctcatcttagtaataataatagtaacaacagtaacaaaacagctgacattccacatctgggataacttttaaagttttacttatattatttcactcaattgctgcaaacaatcctatggggtaccagtattattattattatttaatagatgaggatattgaagtctggaggtgttaagtaatttgtacaaggtcagggaaacctggaacctacacctgtctggcactaaattccatgattgtaccacgaggccaaaatacctcattatgttattatctcaagtgccagagctcttcattcttccaacatttgccaagctccccaagctcagatatccctttgttgtctgttatcagtgctcctgggcaggacattctctctgccagattagcctccttccaaactcctatagctgggtctatctctagccatactaaacctagagttatctctagtccataaacctctcagtctctgcagccctccacatggaacccggccatgcccaaccacaacccaagatttgctctctagggttggctctagctcccagaatttatgacaaattcctctgggaactgcctcttgaggagccatccatacacactttaggatgcccaggtcatttaacagccccttcaatccttggcttccaccagccacccacttcccacactttctctggatgaactgaaatatccactcttttgtgtctacagtctcatatggcaccattcttattcctgacttctgagacacttagcttcaagactacacagtattgggaaatggggtgattctgcagtctggatgtgctggattgcatctattatcagttttttttccagtgctatctgccaatgtccctcacctctgaccccaactatctgtgcaggaaggaaataaagactctcagagttggaagtaactttagaggtcattaaatccaaccctttacctgacattgatccacatctgcagcattgccaataagcaattgtctggcctcagctagagctgatggcagggtacagggtgctctagactcctaggacaactccttctagtctgccgatatccacttatctaaacttttacccacacattggtgctagctctgctccctggcttcacacagagaaagtcacattcctcttctctatgattgccttcgaagtgttttaaaacagctctcatattgcccgtgagccacccacttcgcttttcatgctaagctgtctgagttctttcatacgctcctcatcgctcgtggtttctgtgacatatgaggagcatcacctctggtcagccatacatctctcactgccttctactttattgatgggcccaggacactgccaacatcaaatgcatagcctcctcttcatggcttgaagccaggctgatgcacattcaggaagaaatggaagtgaaggctggtagaagggtaggaaagggaagttttcagagagagcaaacttaggaaatgagaatgcaggtgctgataaaagtgtatgctagaatgtgagcagctgagagtcacgtaacagctgggagaatgggtatggctcagctcttcggagaagggaaaccttgggaagggctttctttgggcaaacaactctaaggggaacaaaccagctgtgcttagagtagtgaatcccaatcagagagatgctcatttgagttatgagggccacccttgggaattgttatcgccgtcttgagttgaaaacacagattttgaaagtcccaggtttaaaagatttttgaaaaaggtatttttttctttctaaaccagacttaggtccacatgcctagactattgtccatgttaccatatggataaaaaagctaaaactaatcaatacacaggttgggttccctatcagagcctgagatggcacaccttctacaggtgatttattgagggagtgttctcataaaaagcctagaagcgggaaggggaaggtagggcgggggaaaaggtaagcatgaatgtggtttcaggagaagtccagctcagcctgatcccacgggaaacactgagtgtaaactgcaccacaatgtattccatcttgaggtgagatgactggcatttcctaatcctgtcagtcagtcactggccactggctgcccccaggtggtggggaggtgaataacttcccaggtatctccagaagaggcagcacctgtcaaccaagggccagcctccccacgaaggggactgattaagctgttatgtgctctacctacaggtgcagtaaagaggatctgggctgaccaacagtgtcttccacagatacacttgctaattcacgcatggaagacccagagtgtatcactcccctcaactgctggactactgtgctgcaaactttgagtcagaatgatgagcttcagtcaggcatatcatggctcctgaacaggattttgagagcaagattctgtgcctccctcatcctgctgcagcctctcagtgcatctaggtgtttctgcttccattgtacatatctatcaaaataaaattgttataattaaacaaacaaataaatagataaatagatctggtggcaaatgagcagcaactcctccccactcccaacataagttaaagtttgagtttcagcaacagatgtaggatcagaaaacaaatgtttaatatgttctgttgcattagagcggtacaggttggcaagtccttagaaaccacctaattccaccccttcattttacagataagcaaactgaggcccattgaggcttattaccttcccaaaggttgtgcaactaaatctacagaggtcataaatccaggcaaatacgttgcttctgttttatatgcttaatttcttctgagcataaatttcaatggctactgaggcaatcaatagagaatatatcgaaatcagaagaaaataagtactgggagatggaaagatgcttcagcatccaaagaatggcactttggggaatgctgtcctcaaataaagcccaacctgataaacaggcttttatcagagaatttcaatttatcaaataataaccatgtagtatttctgagcattggagacagctgctatccagcaacccctaagcccagtctgtatggttttaagtcaaatgcatgagtgaaatatgatatatggagtttcaaactgggaggggtgatgtaggcttggtctcaggttgtaatagatcatgggtcaaatggccttgctggtcaaggtagatattttaactcagctccatcaaacataaacatcctacaaaaaagagaaagcacacagcaaattttcaggtctctctagactcaggtggtatcgttttagtctcatggagggaatggggtgcgtggcactttgacatatgggctgctctatggagcaccacctctaatggcaaacttagtgctaaatgctaccaattcggtctttgggagattttttaatgggaccacatctcagctcttacaaaagaaatcagtagcaaactaggattcactttaccaaaattttgttaaattcatctcttcattaatggaagaactttctatagagaggaaaagagaactacaatacagaggaggaaaggaaccaacaccccagccaataagcttccaggtagccttctaagcagttctggatgtctaaaatcttccagagaaagagacacagacatgcacattcacccaacaatcaactaggcattatttaggaacttgtgcagtagcttcagttttttctttgcaagtagacattgtgggtcatcaaaatagtcagctctcagtcattgtcttaccccttcatcacatcagaaagaattttatatacccctgaaagcacgacttccagagagcttacagcttaaagttctaaactggaagatcccaaacggaggctgacattatggaaaacttgcttagcttgacaaaggttgcccccataagggcatgccaaatgttcgcaagacttcagagcatcctaaggaatatgaaaaatcatctattttgcattagttacaatttaggccattttgacatagaatctagagactttacagacgggagagtcaggatctacatctgtgtgctgaggtggtcttgcgagaagtggatggttttgcaagaagaaccagagttgactcaaacttgggcctcatcatggagcagggttgggcctgtcaggatgtgtgactttgtgtaaaggaacacatctctggtgcatcttagcaaacattcaaaaaacagtaggaccaagatggcatcagataaacaagcagaaatactatcaataaatttccatcaaaggagagtaactggtgctcagttttgagcctaaaaggaaggaatctcctaatgacctcaagactacccaggagactcaagaagagagcaagctaacattgattggatgtgtactgtggagcagacatgacaccagatgcacaaaaagtgagatcccaggcctagtaatacacacacatgcacacaatacatggctgaataggagtactcccaaaatgctaaaataatatatataattatatctgggaagcaattaatggcgatttttcttttctttctttttttcttttttcttttttttcttttcttttttttttgagacagtgtctcgctctgttgcccaggctggagtgcagtggtgtgatcatggctccctgcagcttcaaccttccagttttaagctaacctcccacttcagcctcccaagtagctgggactacaggcatgtgccaccactcctggctcatttttgtatttcttgtagagactgggttttactatattgcccaggtttctcctttctttattatttcccacacttcccaaattttctccaatgagcatggattacttctataatcagaaagtgtattattaaataataacaataatgggacaagtcatcccaatgcaggtggaatcctggctacccatgatgcaaaaagaagcttgaaaacaacaatttcaccatatatcaactagacttacttaacattaaacaagcttcaaacccactttacccaaactctgaagaagcagtttgacagctatgtgctaagcaattctaggtgccaagaatacaaggatgagtgaagacatcaggccttatgaggaggggagaaaaaagaaatatgcgatttgtaaaaagttagcaatgcgatattacctcacacttgttagaatagttgttgtcaaaaatacaaaaaataacaagcattggaaaggatgtggagaaaggtgagcccttgtacactgtgggtgggaatggaaattagtacagccattatggaaaacagtatggaagttcctcaaaaaaattaaaaatagaagtaccatatgatctagcaatcccactactgggtatatatccaaaggaagtgaaatcagtatgtcaaagagattctgccctcccatgtttattgcagcactagtcacaaaagccaagatatggaatcaacctagtgtccattgataggtgaataaataaagatttgtgatatatatacacaatggaatactattcagcctttaaaaaggaagaaaatcctgtcatttgtgacaacatagatgaacctggaggacactatgcaaagtgaaataagtcaggcacagaaagacaaatactgcatgatctcacttctatgtggaatcttagaaagtcaaactcatagaaacagagagtagaatggtgattactggggactggggagtggcagggtggataggtgagatatggatcaaaggacataaaatttcagttcaacaggagagacaagcccaggaaatctattgtacatcataatgcctagagttaataacaatatattgaacaactgaaaattgctaagggggtaaattttaagtgttcttaccatccccccaagaaaatggtaagtatatgaggtaatacatatgttaaatagtttgatttagccactccacaatgtatacatacttcaaagcagtgttgtacatcataaatatatgtaccttttactaataaactttttaaaattaaaaattatcagtggctaaaaaactagggtgttaaatcatttctaaggtcatttttagcccaagcacttcatgattctaatgcaagaaaaagaataatgactgttctaacagaggaataaaccaaaatgctgtttagaagacagacgagagagtaatttagattatgggaatgggaaggggatgggcaatggtttcctggagaaggctacagtgatggtaaagctggattttgaaggatgactaggatttagataaatagacatggagaaagaggtataaaaagtaaagagggtggcgtggtggctcacacctgtaatcctagcactttgggaggccaaggtgggcagatcacaaggtcaggagtacgagaccggcctggccaatctggtgagaccccatctctactaaaaataccaggcatggtggcaggcgcctgtagtcccagctactcgggaagctgaggcaggagaatcgcttgaacctgagaggtggaggttgcagtgagctaagatcgcacaactgcactccagcctgggcaacagagtgagactccatctcaagaaaaaaaaaaaaaaaaaaaataaagaggtagagtaggaaaggtccgtgagtaaagggttctgggtttattccaggaacagcaagtaactattcaattagcaagccatgcctgggtcatggtatttcctgtgggcagcccccatatttagcatgatgtatgcagagtctgggtttaatgagactgcattcttgcactcagctatcacctcatctggagggggtgggaaatgggctgggagttctacaatggcaaggctttaggctatttttatcacactgcacaataggtgctctatttgattgacaaaggaataaccatgcatgaagcactatgacacactgctataaaagctgtgcacagggtgcataggtcacccattcctggcgtggggagaggggctggcacaggacaagtgagcttcctagagttgagtttgggagcatgggattcgatgtggaagccaagatggtgggtaaggagaggacgtttgagcagcagaattaatatgaagagcacagagaaaagtgaaagcttaatatataatgagaattgagaataccaccaacacagcagttgcctgtgctccaaagctgttggtgaagttatagtatggaatagtgagcaaaccactggactgagagttgagtgagctcctgcgggacactaagcaaagcaagaggcctaccctgctctaggcacctgccacatagtaggccttcacatattttatggcactgagtcagcacgatagctctaagtgataggtattattgttcctaatttagagatgagacaatcaaggttaagaaacttgtccaaaaatatacagcaaattggtggcagagttggaattccaactcagatttctccctaaaactcacattcttcacctacatgttcctagtataataataataatttttttaaaaaagatagactagattagctatggacccatttggccttgtgcaagaattccaaagatgtgatcttcctaaaccttcacctccaccatctctataatgttaggtgatgtcagttaacaagatctacacaatgcctctaacaagatctcatagtggagagacctttcttttgttaaggaaagaaagaaatgtatttcctaagaaatctcaaatttaaaatacaaacacatacaactatgaaagtaggttaagtatgaaactgaaatgtcatttgtatttctgtacttggagtcagatgacccctaacatgatgagcagagaaaaaacataaaataaccatgtcctggacacaagcagtagggccaccacctgtcagcaagagttaactatcgaatccaactgtgacctccattctaagaaaccccatctcagtcaggttggatgtaaacccactgctccaaacagagaaagcagtagccacctctccctccctggtttcatctttcatagctttactcatcaggtctgactcctgtgaatagcccgactactaatatggaaaccaaccccaccttccatctttgtagctggcacagtgtacacatatattgcctcccaacatccctgtgggttagtaagtcaaatattactatcacatgttagatgaccaagtcgaggcctagagaggacgcaagatacaaccagggaataagaaagacaatgttgtagctgggcttcaaacctttgtctttctgctcttaatcttgcactcacattatccaacaccatgggcagagacacaatccctcctccttccttccactctaggtcaatgaggcaacctccctaagtagacaatctggaatcaaagctgtcttctgcttttccaggagggaaaaaacgtgtgcttatctgaaatcagattgtcctagttgagggctaagagtgtacttgcatgagcatgaagcacacctgtttacattgtagtcagcatcccacacctggcttccctgggacttttaccctccgcagacagccttctctcactctgctagaatcatggctcattcactaattaaagggtattacacacttcattgcacatcagctaagagcttggaataagaaagcttatgctagagcatttgcactggagatgccactagatatgcttcatagaaaaagaaatacagagaaaagccatccccttgtgacatcccttcccccatacttaacttctctaataagtcagccaccgcacttaaagaaagaagtcacctagcatggtacaatcctagatagagcctcaaaaataagccaactggagagggatgcacagcagagaaaatgaataagagaaggcgggtcaagtggcttctccaacaaccacctgtccaggctctctgccctcttctggtatggcagcccaataagaaggatgcttatatcccaggccaaaaaaagacagagggacaaaggatgagttgggaggagtactcctcactacaaggtcttgagcaaactcagcatcatgttccctctagtaaaggctcagcattgctgcccactgtgcccagctggggccagagaccagcctccctgctggagcctcgttgggctgtcctggagtagatgctttttctgatactccctgaacaacttgaacagcagcactgaggctcacccccttttcaatgatggggaaggtcacacatagagggccagcctgaggaatggacactcaaatagattactcttgaacttgctgaggacagcagataatgacatgccactgacagagtagtaaatattatccataggcaatttcactatttgggaaacattacaaagaggtcaaaagctcaggcgaactttaaggcctgatcttaaagacctcttgggacctcagcaagtaaaaagatggtccaagtataaaacaatagcctggggtcaaaaaacatttacttctaaatggaacttagacatggattcagaagaagccaccagttggacatgcagtcaggaggaagctagagaactcaacccagagtctgctacttattacagtttctctctgtgtcaccctctgtgtcgtctgtgtgttccatgtgtgttcaggcagacagaggaacagctgagtgcatttccaagctgcacggtgcagtggtgaagccgagcgttgccaggcgctagaaagaacggggtggaatatagtgatggcttcagcctccaagaataaggcattttctctatctctcctcaagccacctaagacatcatttgtgcatgacatgttttaggatcctgtttgctgcatttagaagagcttccaatattactggtcccttctcccagctcagactggcttcctctttagcatacactactgccgattttgctgtgctcttcctcacaaggcttaaaagggataatacaaaacagctcctccaagaaacagagttctagcacacagactgcgagaggcaatgcccccggcactctgggctttttcagaatcagagatagccaacagcaattacagaggctacaggcagagactggttatggcattaaaagaacctcagatcaagaggctggtgaatccaagagggggtagggaatggatgcagcacaggaaaggtaagcaatgtcttcattaggcagaggaccctagacaagtgctggatcacaggtcagccccttcccaactgctatacctgctattcccaacttgcaattgcattttggctcaacgttctgagactcaaaagctctcaatcctccctaaggcagctatgggggaagcagccacactggacttctggagggtcccacagcccctgatacccagacgtgcctggcagcaaacagtagtcagcagctgctgtatgacctattatgccaagttatgcctagcagcccactaactggagaaccctggcagcaacagtgctcctctcgtcctttcctctctgcccctccagtaagccccatcctgaacgtaagccacatccccctccgcttttcctctttactcagctccacactcctcccccaggctttccattcccacagctgttcgccccctccctgcacccctcctcctgcatccacgtcgttaagtgattatacagagagaaaaccgagcctttgagtttcaagccaaagctcccagacaaggcagccgggactggttcaccctcacaggcatctccctgaccctcttgcacacgtgcctccgcccagaccctcctctctgcccaagcactctgaacatctcttggcttcaacctgccaacagatcagatggagccctggggtgcccggcctctcctctccccacatggagcttagaattcacacaaggaaaggaagcaaggagacttccacacctctgcagcatcacctgctccagcaagctcccaaagccaccggagccagccagactgcctgggccccacacccccttctctgacggctttagctccagcccagcccacaggatgcagtgcctgatgccacttccgagcagagagagacacacacgcacacgcacacgcacacacacacagaatgccacctcgtcaatgacaagctgttccaatcacacagctcggacaccaagcggaccggacaacggacagcccaggcctcctccctctgactgggaggaagccaactgagcacgtctggggaagtgatcccccaccgcaagccccccactcaccctccatatttgatctgacagcagtgctctatcctggccggtagccttccctgcaaccagctcgcacaactctgaccaactaccctcgtggccttcaggtgaggcactgctctctctcctgtcccaaagcacaaggaaaccccaaaccaagcaggagaccaccggcgcaccacttctccagaggaccagacagagtgagctgaaaaccaagtactcactgtggtgaagtcttggtggccgcactcctgccctttgaacttgcagtagagcatcatatccttcaggtcatggcccacacggtgcaggaactccagcatgctgaactgcttgggtttgtagtgcttgaagttggccttctgccgcagggcctccagcacggaggggtcagccagatgggggtccgggatctgcaggttgacatccagcagggccagcagctccccagcatggtacaggtcattggtggtgagcctggagaaccggaagccattcaggttacagagggtcacagctgggaagaccaggctttgagccaccacttcgtccaccttagtgacatgctggtaggagaagtagtaggacaccctctcagagctctccaccagcagcaggcccagagagcccacgaaggccactgcccacagcacacgccggatggtcagcggcccatacacgaagatgtggcggatgccatggagggtggaggtgttggcaaagatctggatgctagaaggttgcaggctgccctcactggggctttccttgaggtccatcgggaccccgtgcagttccgcaactggcttcaggttgatcgaatttcagagaagagctcccagtcctcgggctctgcttaaaccttgacgttcaggggagagaacgcaaggcaagcatcgcgccagatgctgtgagtttatcctgagagcccagccgcacgctgacaggggtgagtgtttatataaaacccattcaaactctagctcttgattttttccaggcgataaggagggctggttttatttagggagacaccaaggtgatgtggaagagatgtgggtgggaagggagagcttagccaatggaaataaagtcctcccccctacacacgccactagagacaagattaaaagcgagagcgagagagaaaatgcttaaaacaagtcgctgagcagctcggagcctgttaaccagcgcataatgccccatgttaaccatcctgggggatgtcagggcggccacgctgatgcactgcggtcgggcgcagcggcacagccttcagagccgccgccgctcggttccttttcccatgatgttttggactccgaatgccgtttctcgccgccggcctccgtccctcctctcctcctcctccaggcccccttttgtgggcagaattccaaatgccagcggccgctgctagcaccggggagaggaggcagcgcgcggcgcggagaggcgaggaccggtatctggagactggggacggaagcggggagctcagaccgggatccattctctcctcgcctcctgggaaaaaagggacaacccccaggtcacaaagcctgcctgcttcccccgccccagctccctgtccctgctaggctgccttggggggaagggcagggcgggggagaagggctggtgggggctggggactttctccaagttttctttttagccttttttgaaggtagctagtgggggcttcttcgagggttgacatgacaccccgccccccaggtggcaggaagacagtgctaaactcctaggagccaggtgtgaggttggaggcggcattcctttgcatcaatgtcagggatcccaggttagacccagcctgggatctccagaggggagaatgctaaaaatgcagaaggaagggggcgatccaaacccacagtgcctctgatgcagacagcgagggggcattctaggagagcagccaggagcccctcctgagacagaaaagccaagttgcccctggagcctcagagaaggagcaacaagtagtcgcctcccccaccgccacatagctgtcgggagagtctgtatttgaaagagaaaggcaactgggactccaggtgggactggctgcataccattccatttgggcagtgtgtgtgtgtgtgtgtgtgtgtgtgtgtgtgtgtgtgtgtgtgtgtattctgatcctggatttgtcagatggaagtacatttgggcagtgtgtgtgtgtgtgtgtgtgtgtgtgtgtgtgtgtattctgatcctggatttgtcagatggaagtacagccggaactataggtgggagcaaagaattagcctttccgctgcctacctcttttttcctgaaactccactggcagtcagctcctgctagcaggtgagtgtggctcgccctattggcccatgccagagctcaaatggctagaacctactgaatcaatggtgctaaattcccatcagaaggaagggaacagaaagtctgagtggccatcccaagccacactgccaagctggggcagagccacatggagtcaccttgatgagccaagctctcatcttcagg

SEQ ID NO: 47 - DNA, 42856 bp, Homo sapiens
  source 1..42856: mol_type = genomic DNA
aaaacttgatgcttgtggtctcagagaatgacctcacgcatgccttaattactccacaaggagccacggaccttgaccatggaggaattcagcagacccaaagctgaccaagtggttcaacttcacgtcctcactcatggccacgctgatgtcctgcacctcctgctgacttgtcacctcccttcatcattgccccaaacgtttaaccaaggatccagactgtgggacagtctaaggaaaataggaacagactcttcaaaaacgccactaaagaattaaaacccaccaggtgatgtgtggctcagtaaggttctgaggttgcacagagcatgggactggctggctggatgggagggctatggctagcctggggctttccccaggtttctccaatgtacatagatgtccgtgtttgtcagcatacaggtgtgtgtgggtgacatggatatgtcatcgacaggaaggcacaacagcacccatgcagagatgtccttagactcagcaatgactgccgggtgcggtggctcacgtgtgtaatcccagccctgtgggaggattgactgataactgcaccagttcccccttccacaggctactgggcagctgagccctagccaggagtccgcagagacaggcaggcacatggagagaggagtgccaaggcccggctgagccatggaggtggggggcggggcggaacacgtgcgagtgctgtccatgagtggcccaggtgctgggagctaagcacattcgacggctgcgagtcaggagggcagctccttctggaagcctggagctggtgaggccaggtgctttccctgctgcggtggctggcgatgggagtgtttcctgaggctgccaccaagcccctcctcagcatgggttggtgcgggaagtccttgagtgcctgtgggtcggcaggagctccggtgagactcaagttcgctcaccccacggttctgaaaccggtctcccgcctttcctaccctcaggtttagggaccgtcgcggcagccctagggctgccagattctgcactcccattttaggatgaaagaaatcaggtctagactgagggccacgagtcccaacacccagggaggatccgtacaggggcggggggactgccccaaaccataaggtcaggaggtggacgctgaccacagggacaggtgggcagggaagaggctcagctgctggagtggaggaagccgggagggtcgggggagagcagggcaccgagctggggacgtgtcagggacgaagcgagggtgggcgagcgcggaccgctgggaccccggggctcagtgccgctcaccgggggtgaccgcgcgcccagccccggcccagcctggccccggcgagcccatccaagccgcgcttcccggaggcagaggacgaccgcgctttccgggtctggcgcgggctttggcggcccaagggcggggccggggcgccgtgggtggggaaagggcggggcctggcaggacccggaagtgcgctgcggccccgccccctggccgcgtggctgcgcgtcctggctgttgccgataaagttgtttgacgccggcccggcggcgggtcacgtgagcggaaaatggcggccccggcaggcggcggaggctccgcggtgtcggtgctggccccgaacggccggcgccacacggtgaaggtgacgccgagcaccgtgctgcttcaggtgcggccgcccgcccggggcggacgggtaggcgggcggggggcgctgcgccgaggccccgcccattgcggtcggcgtcccggtgttcgggggcggggcctcggcggccaatgagcggcctcctgagcggcggccccgccccctgctcgccgtcacctgcgcttccgctggggtcccgggggtcccgggggtcccgagtgggggcggggcggtggcgagccttcccaggggtgaggtagaacggcgccgcgtgtcacccgcatcgagtactcggcgcccggccgagcccagctcgcgagggcgccgggaagagggaggagtggagccctagacccgcgttcccattccggggcgtcccccggagcgggagcccgggttgcgcggtggcagatgtcccggccgtggggcctggaagcgatttttgccgagtcactcactgcacttttacttgggcaccttgtgaccgcgaatcaattaaatgtaaaagtattggctgggcgcggtggctcacgcctgtaaatcccagcactgtgggatgccgaggcgggtggatcacgaggtcaagagatcaagaccatcctggctaaaacggtgaaaccccgtctgtactaaaaaaatacaaaaaaatttagccgggcgtggtggcgggcgcctgtagtcccagctactcgggaggctgaggcaggagaatggcgtgaacctgggaggcagagcttgcagtgagccgagatcgcgctactgcactccagcctgggagacagagcgagactccatatcaaaaaaaaaaaaaaaaagtatttattgagcctctgctgcgtgggggaccgtgaggatccgaaggtgcacacgactcggagtttgcgggagcagcccacggcgtggggtccccaggcctgggcaggtggagggcgcagccaggaggctgttggtgccaggcgtgcagagtgcggaagtggggcgctcccgcagaggctgcgcgggaccccttggtgcaaggccacggctttggctttttatggagaagaggggcggaggcggtgcaggcagtggcagcaggtgcacagaaccgtgccagagccagggggtagcttgtgctaggcaagtttaaggcaggttgcagaactacagggtttgaaggagagcccagggtgtgtgccaggaagatgcccgtgttgctgtactgcaggggaactctgagtggagctttcctacaaaactgaggggatggtgaagaagggagggagagtggacaggatttgcaggtgagagcctgcatttgttgcggggaccgtccatagtgtggtcttgtgcttggctttgcctgggcagagccacctggctcaccaggaagctgaatgcccttggctgacctggcccactgcgcccgccagccctgcacactcagcagttcaccatcctttcatctcacccccaggttctggaggacacgtgccggcggcaggacttcaacccctgtgaatatgatctgaagtgagtttgctccagctcagcagcagggtctgagtatatctgtgcccctgccccctgaacatactggctctcacttggaaaagcccccaggtggttttaaacagtcatatattccctcccaactctggagacccaaggccttggcagggccacactctctccaaatgccctaagggagaatccctcctgcctcttccagcttctcatggctccaagcgttctgtggcttgtggccgcattgctctctgcctccgatttcttgtggccttttcctgttttctctgtgtctcaggaagacccttgtcattggatttagggtccacttggataatctagaacgatttatcattacatcttcaaagaccaggatccctagtaagatgttcagaggtcctgggggtgaggacattgacccatcttttttgggggggccaccattcaaccccctgtaggttttattgcattgagttgcataagttcccagtggggctctgaggggaaagagctggccgtggagaaataggatgccttgaaaactgcaggtggatccctgcagtctcacagcccctggaattacacgtacgcttctgtgtggggatattgttcccaagagagggcttctgccagactctcaaggagtctgagacagcagaagggtcagagccctcatatggataggatgtgcgtgtctatcccacacgcgaagcttttcactttaaagtcctgttttctggtgttttttttgttttgttttgtttttgagacagggtttcactcttgtcgcccaggctggagtgcagtggcacggtcttggctcactgcaacctccacctcctaggttcaagtgattctcctgcctcagcctcccgagtagctgagattagaggtgctcaccaacacacccagctaatttttatatttttagtagagatggggtttcaccacattggccaggacggtctagaactcctgaccttgtgatccgcctgccttggcctcccaaagtactgggattacagagatgagtcaccatgcctgcccttgaagacctgtttttacagtactgttgtcctaacactgggggcagagggcaggagcttgccctcctggcattgcccaccctgccttacgaggctctcctgggaggagtttcttaggggtgatacctgccaagtcattccagtcttctaccttgtgtctggaccacgtgagaatcccaggacctgtgctctgaatgccaggtggtcttgggctttctgccccagaccttcacaccatccttctccagtctctcttgtcaactgaagaatgcggttcatatgtttggaaaggagggctttatttctcataaccggttgcagcttgcagggtggccattctaacaggctgggaagtgtagcctccagccagaagctggaaacagacacttcaagagagggaagaataagacagggatttacaccgaatggggtggctgatacagacgtacttaatacgctgtaggaggatcatgagtattcatgaaaggagaactgtgcacacagttgagcttcctgcctcttcacgggtcctatgtgcaaaaaatggcagtgccagcatgacctgagggtggaatttttggcctctgaagtcagaggtgaagcaggctgggtgaagtggctcatgcctgtaatcctagcactttgggtgcccgaggcggaggattgcctgagcccaggaattcgagatcagcctggggaacatagtgagaccctgtctctacaaaaaaagtaaataagtaaataaataaataaatggcaaatcagaggacatgaagactgtgccacgaaaaccctgactgtgccagaaccactccatggttggtggtttcttatcaggaaatacctgtgggttgttttgaagaaaccgcaagagagaagggcctggcgggaggttggctgatgtcagataccagcccaggggtctttggaaagggctgctttctgtttatcccttagggaagagagcctgcagatgtgtctgatctcccacccagccatggccaggaactcagctttcaaggtttctggggtcccctgggccaagaggaggctggttcagttggttggggggggcttagggtttcatttttatttcttttttattttattattttttgaggtggagtctcgctctgtcacacaggctgtagtacagtggcgctatctcggctcactgcaacctctgtctcccaggttcaagtgattcttctgcctcagcctcccgagtagctgggattacaggcgtgcgccatcatgcccagctaatttttgtatttttagtagggacggggtttcaccatgttggtcatgctggtcttcaagtcctgacctcaggtgatctgcccgccttggtcttccaaagtgttgggattacaggcatgagtcactgtgcctggccatttttctgaaacagagtcttgctctgtcacctaggctggagggcagtggcatgatctcagctcaccgcaacctctgcctcccgggttcaagcgattattgtgcctcagcgtcttgagtagctggaattacaggcacgtgccacgcctggctaatttttgtatttttagtagtgacggggtttcaccatgtggaccaggctggtctcaaactcctgacctcaagtgatccgcccgtcttggcctcccaaagtgctgggatgataggcgtgagccactgcacctggcctcatttttctttcttttttttgagacggagtctcgctctgtcgcccaggctggagtgcaatggcgcgatcttggcacactgcaacctccgcctcccgggttgaagcactcctcccacttcagcctcccgagtagctgggactacaggcctgtgccaccatgcctggctaatttttgtatttttagtagagacggagtttcaccacattggccagactgctctcaaactcctgacctcaagtgatctgcccgtctgggcctcccaaattgctgggattacaggcatgagccaccgcgcccagcgcattgttacttctcagtgttcacctgcccgtggtctgtgtggtggtgtctggtgggaaccagtgagtgcgattttgaggcaggtcctgcaataccatagccatgttttcaggtgcccttttcctctgctaatggtaccacttgcttacaaagtgcagccggtgcagaggaatgcagccccaggcgtgaacagtgccctccgctccaaggttcccagcctgcctgccctcgggatcccccgatctgctatcctgtcttgacgtagacatttcatgtggcaatttccagactcacttttctggccagtgttgatatagcaaagtttgttctctcttaattcttccagatgcccctgggctgtctgaactctcttcactagttgtctccgacagcagcttgcatttccaaagtgaggccaaccactttgagtatattcagatttttcttttcttttctttctttttctttcttgttttctctttctttctttctttcttcttctctttttctttttcttcctttctcttttcttttcttttctttcctttcctttccttttttctttcacagagttttgctcttgttgcccaggcaggagtgcagtggcatgatcttgcctcactgcagcctctgcctcccgggttcaagcgattctcctgcctcagcctcccgagtagctgggactacaggcctgagccaccatgcccagcttatttttttgtatttttagtagagatgggatatttttgtattttcagtagagacggggtttcaccatgttggtcaggcttgtctcaaactcctgaacctcaggtgatccgcctgcctcggcctccgaaagtgctgggattacaggcgtgagccactgcgcccgggcagtcaggttttctgtggtggctccagccgtgacggccggggtctgtgacactccagcttccgcgagtgcagcagtgttcacgccccagtcgttctctctgtgttttccgagcgtctgcactggggctgtcagcaccccagactctgaaggagcagccccctcggcgtgcaccgaggcccacatctccctttttcctgctcccttctgcttgcaggaggccccatatgatcggggacccgccttgtgcctctgcaggtcatgacgtcccgctgttggggagctgccacaggacgtggatggcggggcgtggatggcggggcgtggatggtgggacggggatggcggggcgtggatggcagggcgtgtcaggctctgcagggcagcaagtgtgctctggtctgtcttgcaggtttcagaggagcgtgctcgacctttctctccagtggagatttgccaacctgcccaacaatgccaagctggagatggtgcccgcttcccggagccgtgaggggcctgagaacatggtgggtcgtgctctgggggaggctgactgtgtggggcacaggatcgttcagctggccagggacgggggacgggacagtggggggtgctggggaaggagggacatgagtcttagcaccagttctgccttccctgggttgggcccaaacagcttcctgttttttgataactggcaactgaaaatgagcatctcatgtttttttttttttgagctggagtctcgctctgtcgcccaggctggagctcagtggcgcagtctcggctcacttcaagctccgcctcccgggttcacaccattctgcctcagcctcccgagtagctaggactacaggtgcccgccaccacacccggctaatttttgtattttagtagaggcagggtttcaccatgttggcctgctggtctggaactgctgacctcatgatctacccgcctcggcctcccaaagtcctcccaaaggattgcaggcgtgagcctctgcgccccgcccacgtcattcttcatgtggaagtttttctttctttctggggtcagttgtgccttccctggctcagggtgtcagcagcattcacccaccagcctgaccacctgctcatagaattgcccagaatgttagagccgaaagcgctgcatggatgccgcaagggcagcctgtaatcccagcactttaggaggccgaggcgggcagatcacctgaggtcaggagtttgggaccagccggccaacataatgaaaccccgtctctactaaaaatacaaaaattagccgtgggtggtggcggatgcctgtagtcccagctactcagcaggctgaggcaggagaatggcgtgaacccgggaggcggagcttgcagtgagccgagattgtgctgccactgcactccagcctgggcgacagagtgagactttgtctcaaaaaaaaaaaaaagagcagcaaacatttaccatctcatgtggcttctgagggtcaggaatctgggagcagcttagctcagtgtctgtcctgaggctgcagtcaggttcggtggagctgcaatcttttgaagcccccactgggacacgaggactgtctccaacacagttcactcctgtggcgcctgcatgtacccacacacacccacacacacccccacacacccacatacccgcacacccgtacacacccccacacacccctgcacacaccccacacacacctgcacacccccgcacacacaccccccacacacacccacacacacccctacagcaacgtgcacacacccccacacccgcacacacccgcacacaccccacacacctgcacacacccacacacctgcgtgcacacccccccacacacctgcacacaccgcccacaccaacatgcacacacctcccccccacacacacccacgcacacacctgtacacacacacctacacatctgcgcacatacccgcacacacctgcatgtaaacatgcacacacacgcacatctgcacgcacatgcgcacacctgcacacacccacacaccaacatgcacacatccacacacatacctgcacacaactgcacacccccgcacacacccacacacacatatgcacacacgcacgcacacctgcacatacctgcacactcacatgcacacacgcatgctggtgcagccctgccggggagcctccaaggccctcactccagagtgaataggagggtagccttctccgtgggggtcagcctctccctggaggccagggcggggcagtcaccctctctgtgtctggagaatcagtctgggatttagaaggaatagttgcttttcttcctaaggaagtttctcatgtcttataccctccaggttcgcatcgctttgcagctggacgatggctcgaggttgcaggactctttctgttcaggccagaccctctgggagcttctcagccattttccacagatcaggtgagcatcagtgggctgggggctcttccctaccctgtttgctggggaagctgctgtggttactgggtctggttcagagctggacacccaagctctgtgctggcctgtggtgcctcttggcactttgcagtcctttgtagaggaggggtgtgtgggctgccggttcatgagcagcagcctcggggatggctggtcacagctcatcgttctgagtttcctgggcccagcggcccagccttgcccacctagaagagcaggaatgtgcttctgtccttgtgggggcctggtgagcactaaggggagacgttcggtgctgggggcagggctccccatgcttgattcccctggatgggatcataaggtctcttttttttaagaggcagggtctcactatgttggtcacctaggctgctcttgaacccatgggctcaagaaattctcccatctcagcctcccaaagcgttgagattacaggtgtgagctcctgtgccccaccagaaaatcttcctaatagtaattggatggctgggcacagtggctgggcacagtggctgggcaaagtggcttgcactttggaaggccgaggctggcgaatcgcttgagctcatgagttcaagactagcctcggcaacatagtgaaaccccttctctacaaaaaatagaaatgttaggccaggcatagtgcatggtggtgcgtgcctgtggtcccagctatgccagaggctgaggtgggaggatcacttgagccgtggaggcagttgcagtgagccgagatcgcactgctgcactccagcctgggcaacagaacgagactctgtctcaaaaaaataaataaataaaaataagtaattgatgtgtatcagtttctgtcggttaatggtttaaacgttgttcctgaatgtgtaaaaattggtgctttgtcaatttgggtcttttcatcgttggctggaagtctctgtccacagtaaaaggctcagcagaatggaagggacttggggctggggtttgctgtgagccagggggttctcgccctccccgggcctcagtttcctcacctgtgccccggctggtgtgtggatggggtgagttcatgtcttgaggaccgagcatagggcctgtgggaaggtgaccgcgcgtcgggcgctgggaaggtgactgtgcgttgggcgcgcttggtggccccagggctgggcctgctcccgtctgacagtagtgccgcgctgcatggcacgggtgttgcgttcgtgggtgagagcgctgaggtctgcacgtcgggtctcagtggtcatggggatggaagccaccccagtggctgtcggggtgaatggaggcccctggagatggcagcgggttaagcacgagcacggaattctccctcccaaaacggaactcagacaacagtgacggagcctaagagcaaagccaaagccacgggcaggggtgagcgggacccgaggcaggagatgacggagcctaagagcaaagcgaagccacgggcaggggtgagcgggacccgaggcaggaggtgacagagcctaagagcaaagcgaagccacgggcaggggtgagcgggacccgaggcaggagatgacggagcctgagagcaaagcgaagccacgggcaggggtgagcgggacccgagccaggagtggcgccgggcagggaggcaggcagccccaggcgctgtgtgggcactgggtgagaagcagggatcccggcgccctggctctgtgctgcttcctgagacgagagtggcagagggcaagaagaaaaccaaacagcgcggggaacagaagtcaggaaagatgaacgtctggaaggaaatgcccctgggccgggcggtgcccccgggcgtgaacagaatccagtgctcccacaggcacaggtgcttggtgagggccgtcctccctggctgtgctgtcagtcctcagatggggatggaggtaaggaaatggcccagagtggcctggggctgccactggggaggggccgagggtgtctggagaggtggggccggcattgtggtagcataagcctcttcaacagactttgtaaacctcgtgtgaaacttagtttaagaaacaacaggcttggccaggcgtggtggttctggaagtggctttggagctggctttggtggtggctgtgggggtgggtttgggcgctttggaggaggttgcagtgagccgagatcgcaccattgcactctagcctgggtgacaagagcaaaactccatctcaaaaaaacaaaaaaacaaaagaaacaacaaggctgggcacggtggctcacacctgtaatcgcagcactttgggaggctgaggcgggtggatcacgaggtcaggagttcgagaccagcctggccaatatggtgaaactccatctctactaaaaatacaaaaattagccgggcgtggtggtgggttcctgtagtcccagctactcaggaggctgaggcagaagaattgcttgaacccaggaggtggaggttgcagtgagccaagattgcactcagcctgggcaacagagcgagactctgtctcaaaaaaaaaaaaaaaagaaacaacagaagtggctgggcgtgatggctcacgcctgtaattccaaccctttgggaggccgaggtgggtggatcacctgaggtcaggagttcgagaccagcctggccaacatggtgaaaacccatctctactaaaaatacaaaaattagctgggcgcaatggctcatgcttgtagtcccagctactcaggaggcaggagaatcacttgaacccgggaggcggaggttgtagtgagctgagattgcgccactgcactccagcctgggtgacaaagcaggactccgtctcaaaaaaaaaaaaaaaaacaagagcaagtggggcagctctttcgagacaccagggacagcaggaggtggtggggccgttggtggtaaagcccggagcccccagcctgcggccctggtctgtgtggcagtgtgggtctgtctgcgggtgtgtctgcacgtacacctcatttgatgaacactcacacctgtggtggagagtgatttgtggctgactgttgttgctggtgaatatgctgtggacatcttcctgaagggtcccgcacctgtcactcctcacagccatgctcttccgtcgtgtgggtgtcatgtgggtgttgcggggcatctggctgtgtctcagggcatcccgggcagggttgcagcagagtgtgcagctggaggcctttgcacctggtcacccaccccagcttctcctgtgggctaaattccagaggtggaatttaagatagggcttcttcacatttcatttccaggccgggcatggcggctctcacctgtaatcccagcactttgggaggctgaggcagatggatcacctgaggtcaggagtttgagaccagcctggccaacatggtgaaaccccgtctctactaaaaatacaaaaagcagctgggtgtggtggtgagggcctgtaatcccagctacttgggaggctgaggcaggagaatcacttgaactcaggaggtggaggttgcagtgagccgacatcacaccactgcattccagcctgggcgacagagcaagactctgtctcagaaataaatattaaataaatttctaaaagctcagacccaagctttgtcccagaagctggagtttgctaaccatggagcaggatatggacgaggtttcatagtgggtggcgttgccagccccacggtgagggtggagtgcctggtgggctctctgctgggagctggtccccagcaggtctgcatgagggagggaggctctcgtgcctagtgtccctgcactggcccaggaggcttggggaggccttgggaagtccaggtgtccgcagagtgggacgggcgggaagctgatgtttcttctttcatgtgtttcggaggaggtctgagtccagggacagtgtaggcgctgtgcttcgaaggggcgttctgaggctgggggctgcaggcctgtagcgtgcccaggagttgccctgggacagagcctgctttgtgtatttggggacccctgggtgatttccttggatggacactgccacgtgtttgaaacgttgcagctccactgcgagggtgtcactgtagcacgcagccctggcccgaccagcgtctcaagcagcaggggcctcagggataccagcgagccacacgtcggccatggaggtgactcacattttcttttctttcacccaggctggagtgcagtggtgcgatcttggctcactgcaacctccgcctcccgggttcaagcaattctcctgcctcagccacctgagtagctgggattactggcgcacgccatcacgcctggctaatttttgtattttttttagtagagacagggtttcaccatgttggccaggctggtcaggtgatcagcccgcctcggcctcccaaagtgctgagattacaggcgtgagccaccacacctggccaatcactcactttttcttgtaaccgcattaaagaagaaataaaaacaggtgtcattaattttagtaatacgtgtagttaactcagtatacccaaaatacgacttcctggacacgtagtcagtagaaaagtgagccgtctcatgctcttgttgtgcagagtccttgagacctgcatgtatggtgcacttggagcatctcggtctgggccgggtcctcgtggactgggcgctctccactctgcttctcaggctctgctgcagggagggcgtcaggagacagaggctgcacactgctggcttcgagctttcccattttccctatagtctgaaggttctgcccagcacagaggggtgtgaacagccacgccgagctctgggggacactgctctccgcctgcctggtgggcctgtgtctgagtttgggatcttccacgccgagctctgggggacactgctctctgcctgcctggtgggcctgtgtctgagtttgggatcttccacgccgagctctgggggacactgctctctgcctgcctggtgggcctgtgtctagtttgagatctttattacggggagtgtgccttccgtgataggagacgcatgagatggaaatgaggatttcatggcctacgggccctgggggtacacggccctcctggaggcacccggaggaggaaagggagtacctttctgaccagcatctttgctggggtacagattgttatgctaacgggtttcctatgaggagtttctctccatgggtttagagccagcaggcactagccccaggaggtcatactgtgactcgggggatactgtagcacgtctgggcagtccacgagggcaggcgggcgagtcccgtagtttgaatcccacgtcccgtaaggacctagttgccaagtggtgaaaggcaggggtgtggatggaccatgctgagctgctgggagcaggaagagaaccggggactgttgtgggtgaccgagacctgccgtggaacgatgccaagggtgagccgtgggaactcacacagcagctgagccgctttccatctgaagaccgtgagggagcagggtgggctttctgtaaatcagattcatgagctcagccatggaggggatttgtcctctctcagaggtgcccccgggctgtgctggcgtgggcaccccaggtgggagtggcccccagtgtgcccggcccctggctggatctcttcccaggcccccagccctctgctcccagccttgactcagtgcttgggggctggctgagtgcatctcagcctgttcctccttctgtaggtaaagccgtggctccgggaaagctgggtgatttctgcagccctctgggtgtgctggggtgtagggatgggctgctggtgaggacagggctctgccaggtggagcactggcctgtggccacactcagggtgggtctgtgcatgctgctgggccagctcagagctctgcggcccgtccctgtccatccctgcccgtccctgttcatccctgtccgtccttgtccattcctgtccatccctgtccatccttgtccatccctgtctggacctggctgggttgagaaggccggagcctgccccaggctctcccaggctctgtctagccgcttggcggctgggctgtcatgtggtgggtgatgccctctgcgggcctccctgagcccagtggctcctggcctgcagccacagcttctgttcccggcagggcgcatgctgctgcctgggctctcgtcagcacctgtgtttgcgcccggctttgtcatacccagacaggacatgaacacagagagctctagactcactgccttgtccccagcacacagccgcgccttgccggagcggggccccagcggggcggggtttgtggtgcataaagaatatgccctcgaagccagcagcagaggcgtgtctgccctcctggccgtcccgctggcttctggccctggccgggtggggagctctgctggctggagagtgtgtgagagtgtgccagtaccctgctgcgagcaggcacccgcggaagcgccccaaagcacttcttgcatttctggcttcggagcatggtgtctggtggcttggcctggcctggggtccccgggaggccctgggtcttgcccctgcggacattgggacttgcagaggtctgcgtgggggagggggagtaggggctgtgtctcctcgggcgctggaatttcccccgggccctggcgtcctgcacactgggccggcgtagaaggtctggaaccgattgcccaccacccctccctgagatcccgcatgagggagggaatctgatccctctggaggagccgcacatcaaagccgggctggcgtttgatgtcacgctgctgtgctctgtccctgtttgtgatttgaggtccccaagctggcggtcagtgccggggaaggactgtgagttgggactctggccacccctcagcccaggcctccccagccgtagagaagtggcctcatgaccatctccggacccctggccatctgtgtcatgctggggagcggggaccctgggccctccctgtcccccttcctggccctgggggctgtgcttccttgaggcctctctctgcctctgtccgggttctgctccggcgcattttgaggccttgtgttttcctgagccctgcgtctcggggcctctgggccgagtctccagccatttggagggaaggcaaatccaaggccctttgttggctgctctgtgggacgggagcttagggagtgtgtcccagcctgtgcgcagaggacacccgccgtgtgtgtggtgcgcacgtgctccacaggctagaggcccttggggaaggggctcccctgtaggcagtggacccagggagaccatggggctaagtccacgaccctgtggggcctctgcagccagaccaggctgtcagagtcggggcctgggtgggaaagggatgcccctcccccaggattgaggacgtgaaaaataaaggccacgaaacaaaagaaaacacgtcaaacccacacacgtggccgagtccccaggtgtcggggctgggcctgtcctgggtgtggcaccttgggcttttctgcttggtctgttctcatttcagggaggcaagtcctgcccttttttttgttttgttttgttttgtttgtgtttgagacggagtctcgctctgtcgcccaggctggagtgcagtggcgcgatctcggctcactgcaagctccacctcctgggttcacgccattctcctgcctcagcctcccgagtagctgggaccacaggcgcccgccaccacgcctggctaattttttgtatttttagtagagacggggtttcattgtgttagccaggatggtctcgatctcctgacctcgtgatccgcccatctcggcctcccaaagtgctgggattacaggcgtgagccaccgcgcccggctgagtcctgctctttcaagtaggtcagcagatcccagggtcggggcacggtgagtgcacagtggacccctgcggccctgtaagcacacaggtgggttcaggcggaggccgagagttcctgtcccagcatcccgctctgtgcatggatgtgcacgtatgtctcgacctggacactgcagcaccctgccctctgaccctcccagtaccccccatcccggagggttgctgcaagcagtttccagcccagctgttacctaatctttatcccctgtgttctggtcaccagctcagcctgtgtcttcctgtcccacctgagcccttgcaaggcacactggccatagggcctggcagggcacctgcatgacctgaggccggccctggcctcccctttgcctaggctctggccatctgccccctcctctcggattcccctccctggagagggactgatgaggggcatctgcaaggaaggcctgagaagggcttttgtttttctcagtggggaggatttcacggtggggagttggaaacgcagaggcaagcccgcctcatgcagcaggtgccaccagcagttcacatgctctggggctggatgtgacggcatgtgcccgtctcccgggctgccatgcacatcaggcatgtgtgggaggcgtgctgcatatacctgcccacccatgcacgggtccagctgtgcctcctgcggggcgaggctcagaaagacactggtggcagagtccgacatggacttataagcacggcctccccggccacaggcaagcgggcgtgagcggagtgcagcgcccctccctccatgcttcggtgacatcaggcgtcggctttgaaggaggacatcaggcggtggagacaggggcacctcctcttagtgggcggcttaagatgaaagcccagacgtcggtaccctgactctcaggctcctgagtacaggtgtccgtgagccgcattccggagccagtgctgctcgcccctcctgtgcggtccctgggccctgccggcagctccacgtcctgccagcggccccgagactggaggtctcggggggagcccccaggccacgcaccacaggccagggtccttgggagcgcccccggctgtcaggtgcctccttttggtggttgtggggcgcagtggggctgaggtctgtggcctgggcctgggcctgggacgctgtcctgggtgggtgctgggtgagggccccacacctttgctttccgagtctcctgccccagggcctccgtggcactggttgagctgccctggggtacctgatggtttctttcctctcctcccagggagtgcctgcagcaccccggcggggccaccccagtctgcgtgtacacgagggatgaggtaggcggcctgctcttgctcacccagtccccgctcactttcagcccactttccaactggaaaatctgctgtcccgcagccgtctccagggcagtggcgggagactcgggctcttgaaagcacgacgtgtttcatggaaaaagagggagtggccggccctcggagcccgggctgccccgaaacctccctcggcgccctgtttgttttttcagcttctctcaaagcccaagagtcacaaaagtggtttcatttaataaatatttgctttgctcggtgttttgatcattttcaaaaccgagtgtggcgtggcgcaagcaaagcccgccgtggcgggaccctcctagcgctcgtccctggcctcacaggggccttttgtttccacgctggctgagtgccctttgctggggtgggggggcactggcccggaggggccctggggggccaggacattccccgcatttatccccatttggaagctccctggctggggctgtgacggggaggttcaggtctacgtcctcccttgaggggatgagccacggggctcaggacccaggcccagcactgtcctgaggctgtggccctcagggacccttacaccctttggcttttgtgctgggccattgactgtgccctcgctagaggcagcttctccaccccttcctcacaggtcagagttagcgtatgggacgtggccagccaggcccgatccctgcccaccccgagctgagcaccaggaatggccacccccgtgggtgacagcacgttcctgcctctctcgctccgggcagtgggtcctggcaccagggcttcctccttgcagcccagctctgccagcccaggcctcagtgagcttgggtcccagctgcggagaccaggctgggggagacacggtcaggcatgggcagcaggtcctgccccggctgcagaccagactcaagctgggccttgtggagggtgtggaccggcaggggccagatgtggggggtgggtaggatggaggccagagagggcacgtggcctgtggtcctggtggtgccggtgcccggagggcttccctgggctctggggtcccggtgcaaggcgcacctgtcctggctgctcctcctgcaggtgacgggtgaagctgccctgcggggcacgacgctgcagtcgctgggcctgaccgggggcagcgccaccatcaggtaagggcagtgctgctggggccgaggagtctatttagctaaaaaaaaaagtggtctcaaaggaaaggagaaaggacacgtggcaagtggggagtaggtgtacccaggccctcatcatggagagcgcctggtggcctctgcctgcctgtgggcgtgggggctgggctgccccgacctcatctctgtgtcccccagaggggcggtggatcttgggagggcgcatggggcaggagagggtgaaccgggggcgggagagggtgagccgggggcgggagagggtgagcctgggccgggagagggtgagccgggggtaggcaccacaaggtgcttcccttgtcctctggccccactcaggtttgtcatgaagtgctacgaccccgtgggcaagaccccaggaagcctgggctcgtcagcgtcggctggccaggcagccgccagcgctccacttcccttggaatctggggagctcagccgcggcgacttgagccgtccggaggacgcggacacctcagggccctgctgcgagcacactcaggagaagcagagcacaagggcacccgcagctgccccctttgttcctttctcgggtgggggacagagactggggggccctcctgggcccacgaggcctctgacatcatcttcagctaagttgccgaagtccctctccagccctggaggcccctccaagccaaagaagtccaagtcgggccaggatccccagcaggagcaggagcaggagcgggagcgggatccccagcaggagcaggagcgggagcgggtaaaaggggctctaggccttgggacttgggggtgtcctttctcctgatgtgtagccctgcgtggctttagctggtcagcctggtggcgtggccgtgatgcgggcagaggaacccaaacgcgcagaggaacccaaacgcggggctctggacaggagccttctgacttcgcccaggaaggaatttaggggtaagcaggtggtagagaaagtagctttactgagacggtggctgtgtctgctccgggatgaggccgtgtccgctccgggatgaggccgtgtgggctccgggatgaggccgtgttggctccatgacaaggcggcaactgtgtcagctccgtgttggctccgtgatgtgtggcacagagcagggccgccctggggtggtgcatggagggcagcagctcagggcatggccgtggtcacatttacatccactcaactacatgcacgttaaggggtggggcattcagaaatctctagaaaaggggtggtaacttccgggttatggccagggaagggggagctggtgaacgcatcagccagtcttcaatctggtctggaatcaagccccacctcctacctgagcagggtcactgggcttgttcttagcttctcaggcaaatgatttttttttttctgggtttttttttttttttttttgagacagagtctcactgtgtccctaggtgggcgtacagtggcgcgatctcggctcactgcagcctctgccacccaagttcaagtgattactcctgcctcagcctcccgagtagctgggactacaagcgcgcaccaccaagcccagctaatttttttgtatttttagtagagacagggttttaccatgttgtccaggatggtctcaatctcttgaccttgtgatccacccacctcggcctcccaaagtgctgggattacaggcgtgagccaccgcgcccagctcttttttctggttttaaaccacctttactgaggcacccactttttttttttttttgagatggagttttgcttctgtcgcccaggctggagtgtggtggcgcactttcggctcactgtaacctccacctcccgggttcaagcgattctcctgcctcagcctcccaagtagctgggactacaggcgtgtgccaccacgcccagctaatttttgtatttttagtagagacggggtttcaccatgttggccaggctggtctcgaactcctgacctcaggtgatccgcccgcctcagcctcccaaagtgctgggattacaggcttgagccaccgcgcccagcctaatttatttttatttttatttttcataaagacgaggtctctctctgttgcccaggctggtctcgaattcctgggctcaagcgatcttcttatctcagccacccaaaatgctgggattacaattgtgagccacctcaccaggcctgaaagttactttttataatattgtggatagtatcatgcttcctgttacatctttgactggctgactccttgctagttctagtggcgtcttggtttctgtcggggcctctgcagacctttccctttgtcctctcatcgtttttcttcctgtgttgcagcgaatgggcctctggtgcttttggatcgtggcgatcttagtagacatccttccttgtcttgatcgtaacaggaattactagtcatttctctgccaaggatgatgtgtgctataaaaagcctttatcaagcagagaaagttactattcctaactttctgacatttaaaaaaatcttaagtgggtgttgaaccgtttcagtgttttcagcatcaatggagatgaccgtatgctttattttattggcttgtgcatgtgtgttcataagtgagacagactttttttccttgctctgtcttcatccagtttgggaatcgaatttcacctggctcacaagggagctgggcagtggcccctcttttctgggttctggaagttctccgaaggttatggccactgctcactgcagactacacccaccactggggcactgggcccttggcggggagtgcatgcaggcaggcggccaggtgctgacctccgagcatgcctgtgtgtggctgtggcctgaccctctccctcacgcctccccccaaccgtggggacctcgtgtctgtggggtccctggccctgtggctgacttttcctttgtccctgtcctgaccccgcatcagagccctgcacctgggctgctgaaacctgacttcctcagcttcctcacctgcagaactaaggtgttcgtggcatttatgggttttgtgccaaaagaggcagactgggggactgtcatgcggctttcggtgacagggatgggaggaggctgtttcccagcccctgtgtcccctgagggccaggctgccagctgccagccacagcccaggggccaggtcagagcttcttgagctcctgctgacgtagtgggcctggaaggcccccatgcctccatctcctgtggacatttaaaatatttgtgtctgggcctgtggcatggtggctcacacctgtaatcccagcagtttgggagaccgaggtgggcagatcacctgaggtcaggagtttgagaccagcctggacaacatggcaaaaccctgtctctaccaaaaatacaaaaattagctgggtgtggtggcaggtgcctgtaatcccagctactcgggagactgaggcaggagaatctcttgaacccgggaggcggaggttgcagtgagccgagatcgtgccactgcactccagcccgggtgacagagtgaaactccatctcaaaaaaaaaaaaaaaaaagaaaacaagaagtggccaggagggctctgtgcacatggccccggcctcggctgtcccctgggcactcgtgctacgtgtcccggaactcaggtgaggtcaggagtttgcttcctcctcctctggccacttctgagtgaagcaacctcatgcctccctcttgcctcccggccacacacctgggagggcagaggccgggcgtctgcaccgtgttggatgtgggggctcccatctagcccggcgtcagggtccagcccctctgttttctgtccccctggctgtcctgggactgttcctgttgagtggacaagggagtggggagtgagggtgttgggtccattctaggactatgatggtgttggcaccccatcctccctctgggaactctgccaaactctgcactgtgacacctgagtccccatgaagcgctcgtgcccctcgacccgtgtgctccgggtgagcaggggctgaccccctctaggcctgctcttgtggggacccctcagtgtgagagacacagtggctgtcatgttcccccattctagaggcgtgggcctcagccccttccctccgtgaccagggcgggtcttgtctgcagagcgtggggcgtggagcatggggctcgcagcccagagtagtgcccgcccgtgctcgcccgtcgggaggcgctgttggggtggggtcttggctggcaggaggggtccaggggagggagcgtgtgcctggcctgcatggcgtgctgagggcctttgatctgggacttgggcagctgattgatggagggcgtcctgcctgccccgcgcctcccatcgccgccagccgcacacgcagagggcccggggccacatgccgctgctgggtccctttcagtgatggggggaggggagaagggaacaaaacagaacttttttggggaacttcaaaggtacactttagtaagcaaaaagagtttccaagtttcccattaatgttttgcctgtgtgtggtttttggacttaaataaagagtcagaaggaagagacaggataaaatacaggcaggtcctcggccgagacccggggtggttcacagacccgggcggttcctgcctttgatgtcaggcattaattattagaaggtagttttactggcgatcagaaccgggcgctgggagaggctggggctgcccggcgccccctggccctgtctttgaagtgcctccactggctgggaggctgccctgcagccctgtgctgggctgggacgccagtcccagcagacgccccccacaactcggcctcccggcagctggcacgagggccgctcctgatcaaaggctgggtctgcccgcacgggctggcggctgctgccctgcctgcccctcccgcctcgggggtgaaccttgctcctggagccggggcctggggtttcctcagcacccctgctcacacccggccctctgtggctgacagccggtgtgggactcgtggggcggggaggagcctgtcccagggttttgggggtaaaccagcggggaggaggctgggcctggagcgggtcatgcactgggcgtggtgaatacaccctgcctgggacccccgtgtgcctggcagggcaggtgctgttgaccctgggcagtaggtattgggccaggggctcctgcccctggaccctgacgccgggctagacaggagcccccacatccgacgcggtgcagactcccatccctgcggccagcacagtcagtggccagggtggcccaggtccctgctatgcctcatgggtgtctgaggacaaccctgggctctgaggctgtccctaggggcacagcctgtggccttgattggaatggccaccaagcgtggctggcagatggctcagcgactttgcaggtggctggctgagtcccggctgtttagaagcctggtgactgacaggcgcttgtgttttggtgaggaaccccggggggtagggggtggatgctcgccactggggctgtggggagaactgggagtgtggggctccgtactgggcgagtcggctgctgcagggcgcagaccccactggccccttctggcctggactctcctccccgttgggcccaagatcccctggttgggattgttccaggaactcaggtcaggggccccgtcagcccttcccgggctcccccaggagcagcctccagactctgccctgcggatgacccccctcaccaaactgcttttcctgcctgtccgggggtgttggtgcgctttatccacagtgacacacgcctgccacaccgtaacgtgcccagctccagacgggctcatggtcagcccaggctgcagcagtcctgaatcctgttcttatttttcttttcttttttttttctttttccttttttttttttttttttttttgagacacagtctcgctctcttgcccaggcaggagtgcaggggcacaattacggctcacagcagtcatgaccttccatctcagcctcccgagtagctgggactgcaggtgtgagccactgcacctggcctcttttcatcttctaaagtatttttctttttaaaattaaaaagtgatttttttttcttatgagtacctcatgctttatattttcatcttttcattttcattttattttattttatttatttttttgagacagtctcgcgctgtcacccaggctggagtacaatggcacgatctcggctcactgcaaccttcccctcccagttcaagtaatttttctgcctcagcctcccgagtagctgggattgattacaggtgtctgccacctgtaatttctgtgttctttgtagagaaggggttttgccatgttggtcaggctggtctcgcactcctgacctcaggtgatccacttgcatcggcctcccaaagtgctgggattacaggtgtgagcctctgtgcccagcctatttttatttttatttttattttttgagacagagtctcactctgttgcccaggctggagtgcggtggcatgatctcagctcactgcaacctccacctcccgggttcaagtgattctgctgcctcagcctcctgagtagctaagaggcgcctgccaccatgcccggctaatttttgtatttttagtagagatggggttttaccatgtttgtcaggctgatctcaaattcctgacctcaggtgatctgcctgctttggcctcccaaattgttaggattacaggcgtgagccaccgcgcccggcctgttttcatctttttaaaataactttttttttttcgagacagggtctgtctatgttgcctagcctggagtgtggtggtgcgatctctgctcactgcaacctccacctcctgggttcaagcgattttcgtgtctcagcctcctgaatagctgggattacaggtgcccgtttagtagagatggagttttcatcatgttgacaggctgctcttgaactcctgaccttaggtggtctgccggccttggcctccgaaagagctggcattacaggcgtgagccaccgtgcccagcctaaaataacttttcttggctgggtacagtggctcgcacctataatcacagcacttcgggagaccgagctgggaggatctcttgagcctaggggttttagaccagcctgggcaacataacgagaccccatctctacaaaggaaatttaaaaattagtagggcgtgatggtgtgtgcctgtagccccagctacttgggaggctgagacgggaggattgcctgagcctgagagatcaagactgcagtgagctgagattgcactgctgcactccagcctgggcaacagagcgagacgctgtctcaaaacagaaacatctctgctttgggccttccttgttggcctctccccagccatgtggccactcgctggcaggcccgggccatgagcatcggtgcggatgctgtgctcagcctgggggcggcgccgtctcctctgggtgggattcgaggcctgatgcctctgcctggtgcaggagggatgttgtgctgagggtgttccccgtgctttggatgtaaaatttgggcatggagtttgtggtgtcttcagaggcagtcccgcctgcgtcctttgtgcatgcctgtccacgccggtcgcagcggtctccccacagagcccgcgcccacgccctggcacagcctctcctgctgtgcacgtcccaggcctttgatggcgtccacgtgctccgccgcctgcctccgagggtggccggggcgctgagtaactcgggaggtttggcccgtgtctggcgtagtgattcattgaagctcagagcctccaggggaaactccacactccctctcaccggagccctggcggggcaggccgggccgagacggtgggagggagggaggccgggagggaaaaacacaaaccctcagagacgctggaaactctgaggttggggccacctccgaatgggttcacatttttcctctgtgtgtcatcacatcctggaaaattactgtcaagaaaaggagacctctgggcagtgtcccggcctgtgtgcatgcccctggcgccctcaccctgcagcccccagcctccctcccctcggtttcccagctcagcggcccagggatgccccagcactgtctgctgtgaggccgcgcgcccgcagggctgcccccggcatcccggacagcgtccctgtccttagtcctgcccgtcctttctggcctttctccggcccccttccagtttcggggcatctggataaatggttagcatcattgtggtccggtccttggcggccctcctggaggccgggacctgggggtccaccgggggcctgggtttgcaggagacaggaaggggctaaaggggcagaagcatgcaggggcttcacctgcaggaggagtcgggtctttcacagctgcccggccaccctcggagcctgagaggccatcacacctttccctcatggtgccagctggaccctccacgctccttgcctccttgtgtgtcatgtggcagccacaggcacccccaccctgtggcgcattttgagcttctggggagctcagcacacacagcccctgtgaaagtgcagtgccggctgctggaccctgctgtgcccccggcatcacccctgtcctctgagacctctgactctgcccagcaagaggggcagggtcgggaagaagggagtgtggggcctttggaagccgggcccaggcagtgaggcggaaaccaggctgggctcagcatggcgagctcctcctggtgaaggcactggtgtccgggggcatcagcggcacagagaaggttctgggctccatctcctgaacctgtctggaagagcccagctgctcccatggacctgcgacctgctgcccggggccgggggtctgggcctctttgcatcggctcaggggaggccatccgtggctgggcgagggtcagctgccatttggatgccccggcagccgtggggctctcgcctctgccagagcaggcagcttccgaggtggcaagggctttggggagcagcgggaggcctgggggtgccgagtgttccggaaatattgctggttcttctggggcagtcctggcccgctgggcagagcagaacacggcctctgctcagtggcagggtggggcgccggggtggcggaaacatgaggccgcgtgaagtgggcatcagttgggccctggggtttggtctcggaggcctgcggggcagtggtcccccggctcttgctgccctgcggttcagttcctcctgctgcagcgcctgtgtgccccgtgggtcggcaggtctcgtgagaggcctcatctgagacaggaagccccacgcaggcttctggaaggctcctcctggctctcagccaccccgttggctgagtgagactgaccccagcagcttcctgaggcgtggcaaggcccccagggacacctggcggccacacacctgggggaccccaccaaggctgagacccaggttggggccccctgcactgctgaggtttgggcctcattccccgctggccctccgtctgcttgggagctttccaggtggggatgtttgtagggacagtggtatggcatccagttgcctcctccctgaaaccttcaacccgaacctcactcagcacagagaattgggggccagaccacggcggacggaggcgtcctgctgacacagcccctgtcgggatgtgggaaggggcggaggcacagctccagccccagcgtgaccgtgtgtgtgggaaaaccgtccgggtacttggggacagcagggacatttccagtgtgggtgtgtgagagccacctcccccatgcggtgggccctggtgtgatgctggcagctgggacaagagtccttctctcagcagatgctgctgtgctcctggggcacagtctgtggttttcttttgtgtgcatgtccatgcttgggtgttgtgtgcatgtccttgcgtgtgcgtgtccttgcgtgtgcacgtgtgtgcttgggggcgtgtgtgtgtccttgcgggtacacatgcgtgcttggggtgtgtgtgcatgtccttgtgggtgcacgtgtgtgcacgggtgtgtgtgtgtgcgtccttgcatgtgcacaggtgtgtgtgtgtgtgtgtgtccttgcgggtgcatgtgcatgcttggggggcgtgtgcgtgtccttgcgggtgcacgtgcgtgtttgggggtgtgtgtgtgtccttgcgggtgcacgtgtgcttgggtgcatgcaggtgtgtgtgtatatgcatgtctgtgtgtgcacatatgtgcatgcatgtttgccccagagcggaaggaaagtgaatgcagccgaatgatcacatctgcatgaggggtgttcactgttgtgtctgcccatctttctgtgggctgaaatatttcaaaataagaaattgaggggaaagagaaaggagggtgcttgtctctctccttgcctcctgctcctcctccctgtgttggaggctccaggacgcctcacccccggttgacgtcatttttggcctgcacaggcagcccgtttcttttctcctggcaccggcgaggaggctggggaggggggacgggaattcccccaggggccaggccttgactgccctgcagggccctcgctgtcgcttttttccctcacagtgtctcatccctcaacctctgttttccatccaaaggcatctctgtgaatccacctggcgcgggagcggcgctgatgccacaaatgcgggccagactgctgggcagagctcaccagtcaacagggctgggtgtggctggggcagccctgagaccccaggccctgccgctgtggctcccccttcctggcccctcttctctgtgggacagaaagtctctcctggggaaggctcggagctgagctgatgggtgtttgaagtttctccacacacagggtcccctggcatctccctctgtcatttggtggccaagtgacatttcccagcagccctactgcagacgccatatgttctcggggtgactcaggtggcctgggcccttctggtagccgcttatccagcctgaccccaggctccagcgaggctgctccggatcggggctgctctgcccaggtgaagggcgggtgtgggaggtttccgtagaggccgctctcccctgctaccacggccccgtgtgggaccctgggtctgtctgacagacagaggcttcctgagccaggcccttgggatgacgggtaggaatctagggtggatccacaggaattagagattttttcagttttgttttccaaatgaagtcaacagccccctagcagcgtgatgctgatggtcctgtcccctatggcccccatcctggaggcaccctggtgtgggctgtgggcctgggggtccttggcactgtccagtatgcggacgtggcagcagcccacatttcccccagtgaccaccaggctgtgccctggacgtggccgcctgagcacggcatgtcctggggccccgtctggtggtcaggctcagtacgagcccatcaggggtactctgcccgcctgggaagacagtgtggcttctgggggctcctccagggaggctctggaccaggctgcagaggatgccaacctgccacaggctggcctggccgctcatggacatggcggctcctggcccagggtctctcccccgggaacccaggcgtgctcgcggccctctggaatgcaggcgctggggctgtggggggccgcctggcgcctggcatcttgttataaaaagctctggcgcaggctgctctcagtggctgcaggatggttgtggctttggaagggcagcccccaggggccttggtcagccacctgtgggccccactgccgagccgtggtcagccctcactggctgccctgccatgacgctgctgaggtcagtgcagctcccgccagactcccgtgacaagtcataacagagccacatgctgggtggctgcagggccctgtcgcccacagcagtcgaggtctcaggtgtgtccggagggcagccctggagacacctgggacaggcgtacctctggcaggcgcaccctggctgtcacccagtgtgggcatggtgggggtgctggaatgctgtgtagggcaggaggcagcagcccgtggctgggtgggagactgcagggtagacgggacgggaccaggagggttgttcgcagggactgccaagccatccccaggtgtcgagagtgtgaggtaggagtgggagcccagagccggctccaggccaccccaactcccgacagctctcggctgttctgtgtgaggggggacggggccgagtgtgggtcggcgcagtgctgaggtgtcccacgtaccccagcactgtgctgaatgcattgaaatcactgcccagggctccgcgagctgcacggcccggctttgtcaatttcattgctgttgatgccaattaggggtgacgctgtccctcccgcatcccagggtgggcagagggaggggccggcttgttccctgggggcaggcgtgcatggattcagcctggccatggagctgtggccaagagggcagcgggggcagctggactggggtttttgccgacgctctaatttggcggctgtcgccacccctcccccccatggagaccctgacgtggcctgagccagactccaggggccatgtgccctgctggggagcaggggctcagcatcaggtctggtgcactgactgggagaggggggtctccagccctggacaggctctgagtggggtggggtcccccagctgctgtgcccagccctgcccccaggacctggccttggccctgcgctggccggggccagggagggagtgggcccagctcccaagtctgtgtgaccacctcggctggggcactgacagcccggggtgcggagggcccagcccgtgacacccgccgtcagccgcgccctctgcctccagcccgtggaccgggagcccgtggaccgggagccggtggtgtgccaccccgacctggaggagcggctgcaggcctggccagcggagctgcctgatgagttctttgagctgacggtggacgacgtgagaagacgcttggcccagctcaagagtgagcggtgggtgccccctcagtgcctcccggcatcttcgcgccagggtttgccccatcgggtgcttgtgctgcccgctgtccccagtgccagcactggctcccggcccaggtccctgacaggctgcccttaacaggacctcagagggttggggcccagggaggggcgtccagaccttcctgccttgtgtggggagagcagcccactcccaccctggagggtgcaggtgaggagcccggggcctgttgccagggcccccattctgaccagaagccctgttccttcccctcctcaccacaggaagcgcctggaagaagcccccttggtgaccaaggccttcagggaggcgcagataaaggagaagctggagcgctacccaaaggtctgcagacaggatgtgggggcgactgaggcacagctctgagggggccccccgtgaggtctgtggacgggatggggcgactgaggcacagctctgagcgggccccctgtgaggtctgtggacaggacgtggtggcgactgaggcacagctctgagcgggccccctgtgaggtctgtggatgggacgtgggggcgactgaggtacagctctgagggggccccctgtgaggtctgtggatgggacgtgggggcgactgaggcacagctctgagcagggcccccccgtggtggcgcgcatgcccttagtggccagttgatcctcccctgctcatgatttagaatgaaacctttttttttttttgagacggagtctctctctgtcgcccaggctggagtcagtggtgccatctcagctcactgcaagctccgcctcccgggttcaagtggttctcctgcctcagcctcccaagtagctgggatttcaggtacccgctaccactagctcggctaatttttgttgttttttttttttttactagagatggagttttaccatgttggcccggctggtctcgaactcctgacctcaggtgatctgcccgcctcggcctcccaaagttctgggattacaggcttgagccaccacacctggctgaatgaaactttaaacagcacatttgagccgggcgtggtggctcacgcctgtaatcccagcactttgggaggccaaggtgggcggatcatgaggtcaggagatcgagaccatcctggctgacacggtgaaaccccatctctactaaaaatacaaaaaattagtcaggagaggtggcgcacgcctgtagtcccagctgctcgggaggctgaggcaggagaaaggcgtgaacccgggaggtggagcttacagtgagccgagatcatgccactgcactccagcctgggcgacagagtgagactccatctcaaaaaaaaaaaaaaaaaaaaaaaaccagcacatttgaacccaggtcagtgtggttttagaacgcaggccgctgtgcacacacacggcacttggctgtctccatgcccagcctgccacgggggagtcaaagcccaggccctgattgggggtggctgcttctgcctgcctcagccctggtgtccatggcccagcatgggccgagtggggaggccacgccctggtccctggtgcagctccggccgtccctccaacccttccacttgtctggcctaggtggctctgagggtcctgttccccgaccgctacgtcctacagggcttcttccgccccagcgagacaggtgggcagcgctgtggggtgtccggggatggggggcaggggcccatggggcctctcccggctccttccttccaggccacaggactgcagccacctggcctgcgggctccagggcactgggtgggtgcgggtgctgatgtccccttgggggtgcagaggcatcccagttcgcagagtgtcaggcaggctgggcgcttgctccaggtgcccggccccagctcagggagcccgtggtcctgagtgctcacgtcgcccacctactgggcatgggtggggcagaggggcacccagaggaaggcaccctaccccgggaggagggcagtggtgctgtgacattcaggggcttgtgacctgtacccagacggccgggcggcagcagcccaaggtcacaggggcctcccccagggaaagggaagcgcttaggctggggcgggggtggggctggggggcagcgggtggcagtgggagtgctctccagcagggcgggggtcccaagtgtggcccgcacggtggcccagccacgccgagcacctggagtgctgtgggaggaacagggctgaattcccacccctcggggaaaggcccaggagggtgggagcagtggcccaggtgctggggcagcccggggctggcgtggtggaagagctgtctgtatgttctttttctcctctgcagtgggggacttgcgagacttcgtgaggagccacctggggaaccccgagctgtcattttacctgtgtacgttttttctcctgagcccactcctgcctccagtgctcggggccttggtgctgtgggcacaccgcccgtcccagctggggctcgtggcagcttctccacaggagcagcatctgtggcctcccgcccaggtgcctcctgcagcccatggtgtctgtgtggagacctaggagggcccttctccccgagccaggcggtgggagccaggcttcctgccttctctctcagcgccctgctcccctctggagccctgctgcaccccagcctggtccccacccctggggctcaggccactcctgcccgagggctgtgggaagggtgggtggacagggagtggctggcctcccttggagggtgtctaggtggcaaagggttaggctgcccactgcaaggggagccgggctgcacgggtggtgtcccctgcaggtgggcctgccccccaccggcccttccgagccctcagctggagtttctgcagcaggagtgtgggcacagggcgtgctcgtgaggggctcttctgccccacttgaggcgtcacccccatctgcaggcctgtcttccttcgggcgcatggatgggcgaggtccacggtgcttcctaacacgtaggtgccttctctcctcagtcatcacccctccaaaaacagtcctggacgaccacacgcagaccctctttcaggtacctgagggcctccctggggtgctgcggggcggggccctccagggagggcaggacgagagcgtgaggcctcgggcaggaaggaggggcctggcaggcgctggggcaggataataaagcctttgagagccggtgggttccgagggggccgtgcgcctctgaagttgcttctgacacggctttccggcctcctctgcttcctgcctggccccgggtgggaaaggacctgctaggcggcctgcctgaactgaggccgcttggaggtctcggcccccctgggctgctgtgctggggccaaggcggcagcagtccctgcccaggggtctgggtgaggaagggcccggcaggcctcggagcagggctcagggagccccagagggaccaggccctcagctggaggcggccgccttgggcttcagctgccccttccccctgcccggcctctcccgctggccccccggtccctgctaggaacgccctggtgcccatagctgtccgctgcttctgtgggtccctgccacctccctgagggctcctgagggtggggccagggtgagggtgccgggttcccagccctgctgggccgccctccagagccagaagcaatgaatgtcctgtccttggcctgtgggagagctgcctggggccttccgaagccctctggcctaatggtttcctcttcaaagcctcttcagatattttaattagccacagaggcgggtttttttttaagtggccacaggcctctacagaggcctgggttggaggtgagaagcttgctcactgcctggggctgcagccgcttactgagctggggcaagaaggctggcagctgccaggggtgatcaggagcaggactgagcgggattccctgcagcggaggcaggggaggggtgagacagtcccctctcagcccccgagctgccgggcggactccgggcctccttcctccgtctccatcccctcccttgctggccagccagttgataaacattgaatttggaagatgccttgggatggaggaggaccagtgcccaggcctgcagcccaccctcccgctgggaggcccctgagagcactggggtgctgctgccctgtttctggggacgcttggcttccctaccagccaccgtctcctgccctccatcagctcggctctagcctcggggcctctcggggtggtgtccccggtgacgtgcctgcctgcctgcctgccgtcagagagctggcggggctgagggaaggaagcctgcctccctggcaggcaagcaggcggcgggcgcggaagcaccagctttcacgtctctggcagagccccactccggctgcctgctgcctgggggatgtccaggggccggcccccggcttccgagagggacagcgtgcgtgggtgtgggggctccggtagcccggcagccctctgtggccctggcccaggagagtgcaggttttctgggagggctgggaggaggcggccaggagtgaggacagggaattgtgagcagtgtgggggcaccactgtggggaacaaagccccccgcccctgcctgaaacctgcgtcctggccctgggcatcagggctggccctgccctggtgtcctcacacagtcacttctgtgtgcggtccgcgtcctcaggtcatgaggaaggtcaccctgggctaggcccacctttgatgtcacggtcacctcacttatctcttcaaaggctctgctgtttgggcttccttccattggctttggcagggcaagcctggctcctaacaccctccgtttgttggagctctcaggctgcctctggggaccgtctgccaggacacaggccacccttgctgcctggttccccactccccaagccactcacctggcagggcgtgactggcacttctggcctgagtgcctgctgggcgcccgcccctagccagttctgtcgtccttcctttccacccaggacagccccgtcctgcactgccgtgtcgcccactgccggggcctctctgggaccaacaggcccccttccttccacccaccaggccctaccccacctggaccctctgaaatgttcctcgttgacaaatggtcttgcagaaggcaggatggctcctgcagcccccactcccgctctgtgggtggatgccccgtctctccctgcccaggcaccgtggtgccttctctctcccgggcaccgtggtgccacctccctcccagacaccatgatgctgcctccctcccgggctctgtggtgccatctccctgccgaggcactgtggtgccgccttcctcccgggcacggtggtgccgcctccctcccaggcgctgtggtgccgcctccctcccgggcgtcttgagctgcaagggctcctctcttggcttcgttccccggagggtggtgctgttctcgttggagggggcggccaggcgctgggccacgtgtgcatgcagcccctacagagttgctgccccgtgggggttgacgtgggcctcctttcggaagctcttcctggcaacactgagtggggcaaggggttggcagcagagaggcggctggatttggggccccagtgtcctgggcggcagctagggaggggccggctccaggccctcaggctgtgtcagggcagggcgggcacccccacttctccctgtcagccgagggagccaggcaggggcagcctgagacatcctgggacagtgctggtggggagaggcccctcagcctgtgcctccctcaaaggcccttcccgggccctgctctggctggggggacggtgtgacccactttccctttccagccccagcttggtgaccgggtggctccattcaccctgggtccctcgctgaaacggtgcctgggaccagagcagagaacacgcttgccagtggtaggagatggaggcgacgtggactctgggaggcttcttttttggggtccatccagaggccgagcctctccaagcactggtcagcctccatgccacccagtctgccgaccctcctctccaccatcccctcgtccgagcagtggcgatccctcccgagtcaaggctgggcacaagcacgtggggacaggccgggtaggctgcctggctcagtgctccctgcacagaggcgcagacagggagcccaggtgccccaggcctggctgccaagcctacttccctctcctggtgttcccgagtcctgcccgcccctttctgtgcgtcccgtggggcagtgctggttgggggtcctggcctgtgggggctatgatgagaaccaggtgcctctctgcatcggtggcctctgagggagccctctcgcccggcagcaggtgggatgcagatggggctggccagggctcctgtgcccacagcagcctctgggcagtgtaccctgggcttctgtgagcagccgcagcctgggtgtgaatcttggaggcccggtggtggcggagcatgctctccatctgggagaggctgagaccatggcagctcctggcgctgtcctccccgtgcccccttcctggctccccagcttccggcgcctctccagggccactcgggcagcccctgcccaccccacaggcccttctctgctcacaaggctttgatcccaggcggcacaattgggttttcaaagcattcacggcccttgtttgtgtccctgggcccccggctggaggctgaggtttcggcgttcctgggcctggcctttgaagcttcctcttattaatcttttaacatcccccagccccactcccacccccagcctgtggccctgagcagcctggagccgggagggggaatctggagctgggagggggataccccagcctggcagctgcacccctccacggtggtcccggcgcatccgccaggacccgccacgcctggccccaccttcctcgggtgcagaggccagaggagggaggacggtgatgctgcatggcttgaggaccctcgaggccccagccttcagctggcttggggcttggggtggtcccatggagggcgctggtcccaggacgccctggccttgcttacaggggtagggctggtgtcagacaggaagctgggcgatgggctcatgggggccgggcaggcagagcctgtctgagggtggagctggggcctggccctgggggtgtagctgccttcacagcaggggggtgctctgcccacacccggcccctgagccccccgccctccctgcaggcgaacctcttcccggccgctctggtgcacttgggagccgaggagccggcaggtgagtgtcagtggttggggccagtgtcggagtccagccagcctgtccctggacctcagagccagctgcccgggagggcgttcggtctggggcctcctttgggtctgagagggagatctgcggcccccagtaaccacctccccgagagaggactgggacagccacctgctggccacccccctcccagagctgagtgctggtgggcagatgctgggtggatggtgagtggacccctcctcagaggctcagggtgagcttgggcctccctgcaggtgtctacctggagcctggcctgctggagcatgccatctccccatctgcggccgatgtgctggtggccaggtaagtgccggtgggtctgggggcacctcccgtggcggcactcaccactctgtgtcttcgcctccccacaggtacatgtccagggccgccgggtccccttccccattgccagcccctgaccctgcacctaagtctgagccagctgctgaggagggggcgctggtcccccctgagcccatcccagggacggcccagcccgtgaagaggagcctgggcaaggtgcccaagtggctgaagctgccgggtactgcggctgggtggaaggtggggtgctgtggccgggtggagggcgggggtccgggtgctgtggcagggtcagtgggctggggggctaggtgctgtggccggcagggccgagtgcttcagccgggctggtgggcgggtggccgggtggtgagagcccggggtgtgtggtcaccctgatgtgtctgcactacagccagcaagaggtgagagctgccagcctgaggtgcccactccgccagccacaggaccacctcctctgccagcaggaataaagacttgtgcatccctcaacgccttcctgtcatgcttcctccagaaaagggcccccgtcgtctgccctggctcagctggaccgcagtgtccaggcctgagagcctggtggaccatggtgtgggcccctgaggagcctggtggaccgtggtgtgcatcctgaacccgcgtgggtctcctcttcgtttttaacctaacagttatttacacttcctccaaggagaacagaagtgcttgaggaaagtcttttgggggaaatcacctgcaacccaggagccaagccctgggccaggagctgggggaggagctagtaggtcaccccacatccgtagggcagggcctggcctcaggcctcctgctgcccccgagcgggctatagtgctgggttctggccctggtccaccctgcagccagcctccccagcaagtctgatgacttctacaggctcccagggctttcaaactgacctactgaggtgggcagggcggggaaggggtggatcccagcagccctgcctgcccggggccactggggctacatcgaggatgaagaggctcgcctcaaagttgtcttcgggcaccagggcaggagagaggctgggtcgcctccgatggttcccaggggcagcttttgtgcttcccaccctggggcctgactccctaccctttcccctccctgcacggggctccaggatggcgctcagctgagagcccctggggtgcttccagtcctgggctctgacaagagagagaacgtgaggtgggctggaggggaagtggtccaaggccctgcccgcttcccaagcgttggcacaagtggggcttatgccagaggcccctgagagtcagagggcagccagacctgggtggggcatccagacaggtcccacagccctgcgtctccaagggtgggcagggggcgtggcccgagggggctgacctgcacctctctggcactgcttgggaaaagaggaggccttcatttcagcagggccttgggccagggtccctctcaccctgtgcatcctggtcctgcctgtgaccacaggaacattcgtggaagccactgcccactggtggcagcccccgtggctgccccaacccctggggtaggaataacatttcccaggcaggtggccacatgtacgtggtccgggctccacagcgcctgggggtggggccgaggcactcgcacacatgctgtttgttagtgcatcctcctggcgctttgctttcttaccaggagtggaagggcacacacgggaagtgcagctttgaagcagtttgactttggtgattaatggcaagaaagccaagctgggagagacagttttgatttattgatgttgctttgtgagaacaaatttatagcctggggaagcatcttccaaggggaatatcgcatggctggaaaggtcacacgccagctttgatgtcgggtggcaggaatgtgggcaggaggcagcgctgccagctgctgtttgtcaaacacacaggctacctgctggccaggcctttccca

SEQ ID NO: 48 - DNA, 39244 bp, Homo sapiens
  source 1..39244: mol_type = genomic DNA
tgaaataatctaatgttactaattcttataatacattgtaatgatttaagacttacagcaaactactgtgaactttcaataaccctataaataacacgtgccattcccgtctttaaaacttaaataacaccatgcaacataaaacagaaacatctccaaagtggtttttaaagtctgttcgcggttctggtgcctcccgcgtgtaatccgcagaaatctcactgaaataggctgaactcacaaggccttagaggggtttgggccctgccgcgggggcccacgtgggaagcggccgagagccccgggccaggctctaagggagcgcaggaggatgccgtccccagccggccgtcccgtagactctccgcgcgtacccgcgtcctgggctcgggggcccagtcccggaaagccctctcgggggctgtcagctacggaggcgcaggtcgcgtctgcccggtcgctcctgctcgcagacatccaggccgacggcccgcgcggtccggagagtcagcagtcgcggccgagcaggacaatcggcccaggacctgcgcttccagagcgtgcggcttctgaagcctaggcgccggccggatcgatcgcgcgcagggcggacccaggcggccggggtgggggcggctgcgctgcccgaggcgcccggcccagagacggcggccgggccaaggtcacacagcgcccacgcccgctcccccgcgccccggccgccgaggcccggcgcccccgccccccgcgttcgggccggccgcggggcctcagtttccccgcagggccgggtcggggcgggggcgtggcggcccggggcccgcgtacctgtggaaggagacggcgcgcttctcgccctttccctgccggttggagcagttcacggccgcacagcagatcaccatcgcgggccttggcccagccgcgcagccaggccccggccctagccgcccgcccgcccgcggaccgccccgagggagggagcgcggcggcgacacggctcgggacgtgggccggcccgcggcgtccgcgccgtacggcaagatggaggcgcaggcgcccgcagcgggcccgcccccgccccagcccccgcccgcgtcctcgccagccgcgggttcgggcgtcttcggaccagcggggcgccgcaggcccctcgcagcgtccgtcggcaggcgggcagacgggcgggggagtcgccccggcggggcaagtccgtaccgcgacatgggcgcgccgagcacgtccgtaccgcaagatggctgctcggacggggacagagctcgcctctgccgcctcgacaactgctcctgggtcctctaagaggaggaagcgccacccatggcacacagtgtcccgtcggacagcagaaccagccgtcgtcccacgacacgaccccatgccgcccgcagggcgccccggggctcgcgtcggcccggccgtacgccaaaatggcggctcccgcgtatttccgctcgcgcgccgtatcgtcttcgccgcctgcgccggcacacctattggcccccgcggcgtcccgtcgccgcgtcgcgttgctggcccgtcggagcgacgccgctcgggtcagtcggcggccggactgggaagatggacgcaggtgaggagttgccgggggtcggtctttccgcaggaggtgctcgccttatcattggcctcccctgctcgggtcgggctgccgcgactcgcctcggggcacgccggtgcgggccaggctgggccggggcggcgggcgctgcgggagcgcggggcggtgttggtgggtggtgggcggtgggagcgggagggggacggcggcgcactgcgccgcggaacccgccgtcggttgcgctggagcttctgcttttccggtcccgtccggagcgctccggaggttgtggctgcacaggcccttgcgccaggtcggccgtggagggcggcggagcctgccgggcggggagaggcgcggcggcgaacggggcggccgcggtccgggccggggacgcgagcggcgggcgaaagcgtagcctttccgcagctgagcgtgaagggatggaagctctttaacttttatgaagttattggtaggttggaggagagaaacgtgacgtgttcatcacagtatacgtatcttttttgtttttgtcttcaatttagtaaccagtagattctccaagctgcttttccgtgacgagaaagagaaacagtgaatttgtatcatcgggtcttagtttcttggggtcctaagagagagagaaagagaaggagtgtgtgtgtgtgtgtatagggagtgttggtttttttcctatcctttcatgcttccgctccatttttgctagcaagattattttaagtcagcgccaaacccatcgctagcccagtagccctagaaatatttttacacagaagttttagctcattcattctttgtgggaactgatttgccttttaccaagtatcccccatctgtaaagaaagattttcatctggtttaattctgtcattctgaatgggattgtttttactttttatttttctggtagctacaacataaatttattaagatctgagttggaaaactgtaatgtgtattgccaatatctattaaaatgatttgtagcagctcaccacttaaatgtggtaggtggctggaggaaacaggagccctgactccctaaggagcatgttgaccaggtgtatatcttgtgaagtttgtcttttagaataaccgtcattcacggttgaactatttgcagctgtgtactatttgttgtttactattttacaactgttgtattatatctttttaggtgttattgtttgtgatgcaggatttttctcagccactctggcagccagagacctccggctggcgaggcccctgcccaggccttgcttgggtccaggctcgccgcaggagataccccatctacttggtccaccggtgggcacctggtttgcactatggcacggataccatggccaccatgactgtatgctcagcccctggcgggagtgggtgtgtgggtgagtgagtgccgggtcccgccagctgtttcaagcgcaggcaccagagtgggctctgcagagcttacagctagacatgtggcaagcaactcccacggcggactccagcgtccagacaaagggacagtggattctggtgtccagacaaggggaaggtagtggcgcccaagcaggggtgcttacaaccctgaagcccaagagggggtgttgcagagtgtcagcagccctgttactcccattgccctgctccaggctatagctctggggctggctccgtccccgctgcttccctttgctgcctcctgtcacgtggggtgtcacagtgggtggctgccctttgccggcagagggcccagggccacagtgttacagccttctttgtacttgcattcattgggtccctagttcttgtcccacgtccaagaagaatgagactacacttaacactgacaatcgaagggtgaggagggtggagaatagttttattgagtgatgaaacacccctcagcagagaggggactcaagggtggtcttccacccaaagtcgggtggtctcccttggtgtggctgggtccagggcttttataggctcagaatggggagtgtgtgctgatttgtctgtgagtatgcaaaaaaggttaaaacaaagtcactactcaaaggtgggcacaacagtgtaataaaccaattagagaaaagtaggtatatgtaaaataggtgaagggtggggattaattagaggaaagcgcaccaaacaggaagagaggttcgcaatccagtctgtggatttatccgagactcgtcgcttggctttcaggctttaaactgtggcttgaaggttgggtttcactggtgacccacccctctctgcctaggatttgtctgcctcctgcctctatcatttcgataccttgaggctggagtatcatatgagagacttggctaaggtcaaaaacacggttcagtgtcgatcatatgacctaaaatgtgaaaatcatcatgttcaagttgggagaacagttatgttgttacatggcgatactttattttatcttttattttcccttgacaactgtgttgacatggtgatactttaataggacactggatgttgctgcatgtgggatcagagtagaaaaggtgtttgcatttaaaggtctctgtttatgctgataaaaacgtatatgatgtttgtaggatatcatggggaattttccttctgacttgatgctgtatttcctttcagagatgattaatgatctgccctcctttgatctctagagttcttgaagattctgccttccttgaccatgtgtaatacagtttctgttctgatagtcattaattcaatacactgtttgttactgactgtcagatatgtgttaggcattgttctagacactaggactagagaagtaacaacatagatgaaaaccattgccctggggtagctaacgttctagacatgagaccagcattagcagcgaagtgcgtggctcctgggggatggtgatttgggccaaggatgaggaggattggaattgtagccaggatggccaggaagggtctcactctgaaggtttaagttttgacgaagacttaaagcagtgtaggaggaagggcaggtagcaagagcctggtgtggctcaggtgcagcgggtggcggtgggagaagcaggagctgaggatagaaaggtgacttaggctcagtgtagtggggccttgccagctcatagtgaggactcggtgtttattctgaacaggatggcagctcatagtgaggactcagtgtttattctgaacaggatggcagccgtttggaaggtttcattctagaggaggagtcacatgatagactgtgttcaacaggcttgctctggcatctcttttgagaatgtactgcagaggggcaagggcagaggcagcgagaccagctaagagactgttgaacaagccagcaaggagatgccagtggattagctcagggtgggtaagaggttgacttctgcatgtgttttggaggttgagacaatagaatttgtttgtagattggaagttgggagagggatgggtagagagggaggagttaaagatggccccatagtgtatggcctgagctaagcaactcagatggaggggggcgggcgtggtggctcacgcctgtaatcccagcactttgagaggccgaggtgggcggatcacaaggtcaggagatcgagaccatcctggctaacacggtgaaaccccgtcgctactaaaaatacaaaaaattagccgggcatagtggcgggcgcctgtgatcccagctacgcaggaggctgaggcaggagaatggcgtgaacccgggaggcggagcttgcagtgagccaagactgcgccactgcactccagcctgggcgacagagcgagactctgtctcaaaaaaaaaaaaaaaaagaaactcagatggggaagacttggggaggtcctgtctggtgggaagctttctgttgcgagtttggatttatgtgtgttgaatgtgaggtggatgttagacatccttgtagagcagtgtccagtgggcttttgggtctacaggtttggagctaaaagaataagcctgggctggagatagactggaggtcacatcagatgaggtcacccagggtgtgaatgtgggtgggaaagaaaagaggccaaaggcctctgcgggtgtggagaggtccaggaggtggcaggcagaccacagtgtggctgtgttctccaccagtccctagcactgtccctaaaagcatgctccccattcagacgactggcaggtgccagcacttaaatagccacactgcccattccttgaggacagagctggtgtcttgtgcttgcatttctagtgcatcacttgtgtctggcatgtggttggtaataaaaaaaaaacagaacttgaattaataataacctacacattcccctactatcaaagctttcagtttgtagagtttaacataaatccagtatgttagcataacatgtaatgaatgcagaggctgctggggagtggtttttttttttttcttgagatggagtcttgctctgtttcccaggctggagtgcggtgggcgcgatctaggggagtgggttttaatgtgcgcaatctgcccagtgtgtgcactgaaacagtgttttctagctttctgatgtagctaaatttggagttcctttctctctttctctgttttcattcaggactgaactactagcattctcatgtaaactcttggagatttaaaaaaaagtagtaatcatatgcaaactgttatcttaaacctaagagctttctaaaggaaaagaagaacctttgttgaatttataaaatataaatcttttggaaaataacttctaagtgttttaggaaggtttcttcgaaatgaagtggtttacagtaagctcttaaatttactcgtttttttttgtagtcctctctggttgaatgaagtgtaattggtactaaatggagagaagttggttaaattcattgagtacaattccctacatttctgcctgtcagattagtagtactaagtcacatgttttttctgatggaattactatattattaaaatgccatctgccctcttctgcttgtgatcgcagaagtcccagggaagagggcgtggaaaatcaagtgtctgggatccagccgaccaaatgggagaactgcttctaagggggactctttcttaaggtgtacagcacctctccgtccttttttttttttttttttttttttttaagacggagtctcactgtcgcccagactggctggagtgcagtggctctatctcagctcactgcagccttcgcctcctgggttcaagagattctcctgcctcagcctcccgagtagctgggattacaggtgtgcaccaccatgcctggctaacttttttatatttttagtagagatggggtttcaccatgttggccaggctgttctcgaacttctgacctcaagtgatctgcccgcctcggcctcccaaagtgctgggattacaggtgaaccaccacacccaacctacttcttcatcttgttcctcctgcgtgtcatctttttttgaggcagggtctcacttcatcgctcagactggagtatggtgttgcggcctcagctcattgcagccttgacctcctgggctcaagtgatcttcttgcctcacattcctcagtagctaagactacagatgtccacgcctagctattttttttttttttttttttttaagagagacagggtctccctgtattgcccaggctggtctcaaactcctgggctcaagtgatcctcccatcttggcttcttaaagtgctgggattacaggcatgagccacggcacctggccttacatgtcatcttatttcaaattaatatcattacctggaagtctagagatgggtctatatatttatttatgtatatatgtacatatatatataaacatatatatacgtatatatacacataaatatatacacatatatgtataaatatatatatacgtgtgtgtgtgtgtgtgtatgtatatattttcccccccccccgtcgtccaggctggagtgcagtggcgtgatctcggctcactgcaacggggttttgccatgttggccaggctggtcttgaacccttgacctcaggtgatccacccaccttggcctcctaaagtgctgggattacaggtgtgagccactgcacccggcgagtggatattttttccgaagtttgactccttttctatcaggagctacatgaattaccttataaatcacatgatgtggcacgggaagatgatgaaattatgacaggggctatgaaataagacaagggaacctctccatggcgaattgctgaggcagctggtgtcaggcctaagtggatctcatacatctgagagtcagtgaaggaacaagtgtggtggctcacacttgtagtcccagcactttgggaggctgaggtgggtggatcactggagcccaggagtttgagaccagcctgcttaacatagggaaaccccacctctacaaaaaatacaaaaattaggcatgacggtgcatgcctgtagtcccagctactcaggaggctgaggtgggaggatcccttgaggccggaagggggaggttgcagtgagctgagatcacaccactgcactccagcttgggtgacagagccagacccttgggtgacagagccagaaggaacgtttgggaatggaatcatcgtgttggtcgatctgcagatgttagtgattgtgagcgttagttttgcacccattgtgggttctcaccccacttggaaaactggtggctgtgccccatttcatgggtgaggagactgaggctggaagaagtccaggcctgtgtctgtcctgtagctatcgaccaggctctcagactccagaaacaaacctcagtaggaatcagaagtgttggccgggcgcggtctgcctgtagctatcgagcaggctgtcagactccagaaccaaacctcagtagaaatcagaagtgtcggccggttgcggtggctcatgcctgtaatcccagcactttcggaagctgatgtgggcggatcatctgagatgaggagttcgagaccagcctgaccaacatgggagaaacccatctctactaaaaatacaaaattagccaggcgtggtggcacacacctgtaatcccagctactcgggaggctgaggcaggagaatcgcttgaaaccgggaggcggaggttgcagtgagccgagatcgtgccattgcactccagcctgggtgacgagcaaaactccatctcaaaaaaaaaaaaagaaagaaattagaagtgttaattccaaaaaagttatcttcctccattataaagtaagatctggaaggtcagggaggtctttgtaccgttctgatgcctcagtccatggctcctcattgtgtcttcctcttcagctggagctgcgagggtgtccaggaggggtgagttctgctcggagggcctgccgagggcattccttcctgtcctccagcatgagagggacagtgtggggcccctagagtacagggaagacctcctcataactgaagagatgcgagtctgagagtctttattggctcttttgtaggaatcgctgcaggtctctttggtccttggagccagcccgtgaggccgggggcaggctcttgctctctaaatgcagtcactcttggaggaaaggacgttatgttggattcagtgttagtaaagagactcatgtttggttgggtctctgttgaccttgtactctgtgctgcacctctgcttacagaatacctcccatccatgccggttcgtgactgctcacccgtttcagtgatctgagaaggctggccctgaaagagtggttactgctcccgtgcagtttagagcttttcctgcaccttgacttgtccgtttcacagtgaggacaccaagtcacaagaaggtcactagcctgtaaggttgcgtgactgctcagtggtgggctcagacttctgactccacagctggcgctccagctgtcaggaacgtgctccaggtgtgacgtgtggacactccccacttgcagcgtcctccacagtaccgagaggagggtgcagtgtggtgggagaagcaagggatcatgttttcagagtgtccgccactagccctaggggaatgtatgactcgctcccaacagagggcaggattctcggggagggccggagtgcgtttctctggacggaggagcagagcagcttggggcacggtgtgggagccctccttagggacctcatgggtcacgttcgccgtggctgcgccactcctgttcactgccaagcaccgtgattgctccttggatttgctcccctggggtttcctggtctccttgatggtttatacagtgagcaatctgaggccacacacctgtaattttcacagttatagctggaggtgtggtggtgtatttgaacttaatggaacacctcttattcccttcactctgaagttggcttccttgcctataaagtttggtgataaacctaagaaatacacctgctgtgcattttactgcgtccgtgatgaaaatccctcaacttcacagccgctcaggcctcgtgaccctgctttcagagggagcctttttccttttcttccttatctatacttctctcattcctttaccatttatatttttaatatgggaaactagacatcctagaagtttctcagcttccagattctgttactgcagactgttactgattcaacaatatggtccttttcctgatgacatacgccacattcttctgaagtacagatggtctccaaactaccatggtttgacttacaattttttgactttacgatagtgtgaaagcagtatgcattctatggaaaccatacttgacgttttgaattttgatctttttctgggctagcagtatgcctccagatactctcgagatgccagatagctcctcgtcagccacatcatgagaagggggaatgacccctgctctacagggcactgtgttgccagctgagtttgcccaactgtaggctaatgtaagtgttctgagcacatttaaggcaggctaggctaagctatgatgttaggtagattacgtgtattcaatgctttttttttttttttttttgagacagagtttcactctcccacctgggctggaatgcagtggcgcgatctcaggtcactgcagcctccgcctcctgggtttaagcaattctcctgcctcagcctcccgagtagctgggattacaggcacctgccaccatgcccgagtaactttttgtgtttttaatagagatgggatttcaccatgttgaccaggctggtctccaactcctgacctcaggtgatccacccgccttggcctccccaagtgctgggattacaggcatgagcccctgtgcctggcctcagtgcatttttgacctaagtattttcaatttacaatgggtttattggacataatcccatcctaattaaggaacatctgtagtctacaaagagatacttgccagtgttcatttagctctgctgtactttaaataaaagatatgtgtatctttagttcaaagctggtgccttggaacggtgtcaaacatgagaagaatgttccaacagcaagatggaatcattgtcttgcagtgttgaaattagaccggtggtggccaggcgcagtggctcacgcctgtaatcccagcactttgggaggccgaggcgggaggatcatgaggtcaggagattgagaccatcctggctaacacagtgaaaccccgtctctactaaaaaaaatacaaaaaattagccaggcgtggtggcgggcgcttgtagtcccagctactcaggaggctgaggcaggagaatggcatgagccgggaggcagagcttgcagtgagccgagatcgcgctactgcactccagcctggtgggcgacagagtgagactccgtctcaaaaaaaaaaaaaaaaaaaaagaaaagaaattagaccggtggtgttttcatcctttttccttgagaataagttttctggattttagtctatatattgaataaagcctacaggtcaaagaatagtagggacttctgaagattcaggagtggctttagagaggtagcagggacatcatgatgtttttcagctctttaaaaagataggagtgggccggatgctgtggctcacgcctgtaatcccagcactttgggaggccgaggtgggtggatcacttgaggtcaggagatcgagaccagcctggctaacacagtgaaaccctgtctctactaaaaatacaaaaattagccgggcatggtggcagatgtctgtaatcccagctactcgggaggatgaggcaggagaatttcttgaacccggaaggtggaggttgcagggagccaagatcatgccactgcacttcagcctgggcaacagagtgagactccatcacaaaagaataaaaaaaaggcatggaccttaattcatcctaattcagtttttgtaatcatgtgcagaaacaagtaacatatatataaaaaggcaggagagaatgtaaacttggactttatttattcacagtcaccaagcagtttggttgataatgtctctgaaagcatggacaagtgaaatatgtaagagcagagctcttgggggccaggtgcagtggctcatgcctgtaatcccagccttcgggaggctaaggcaggtggattgcttgagcctaggagtttgagaccagcttgacaacatgattagacctcatctctacaaaaaatacaagaattagctgggtgtggtggcacatgcctgtagtctcagctgctcaggaggctgagaccggagaattgattgagcctgggagtttgaggctgcagtaagctgtgattacaccactgtactccagcctgggtgacaaaatgagtcccggtctcaaaaaaaaaaaagaaaaaaaaacaggagcagagctcttggacaaagccctgctgtggaaagcttgcttcatctggctgcagccgctccacaacgcccgtcatcttgctcaggaagccacagcactactctaggaaaggggcagagaggggcctgggtctcccacagctgagaatcctttaaacagtgcctgtagggccctctattgtggatttggtagttctgcctgcaccgagggagatgcttgcaggtgcttctgaaccctgtgtttgggaattagctgcgcatacaattaaggcttttgggtatagtaaaatttgtgtgcctttgaccctgtggttctgagtcctcgatgttaatgacagagcggacattgcagcccttctgtctgccagccagcacctcattggaagtgtttcattgaaacgtcacacccatatgctgaggctgtcctgttgttatcccattttatggatgagggaacattcacacttagaagttaagtgagtggcccaggaaactacagtttaccagtacccaagctgggctttaaattctgactgccccctgcctccccaaggggattgtgcacagcacagaagttcacacacgatgctttttagtatcagcttaggtggagatctgtgtttatgtagaatgctgaggaaaccacaggcatagtatgatttcacgtacgaacctgtgcataaagacttctggaaagagtcattgctgggcaacgaggcttcacgtgatttgtgtatttttgtagtcttcagaattttttatgattagcatatgtcattcttattgaagtgtggggttgttatcaaaaagtaaatttagatgtgggagaaattcatatgtgattgattttcaaaagattgctgtaaagttgctggtgaaggatgagtgatcagacaccatcagagctggagaggcagcagatgggaattgtgtgttcccagttccctgaagagcagctggagagagatgcctctggtgccgccccagaatacgcaatgggcatctcgccacatgggtgtttgggctggtgcattgctgctggctggcgccttcttttcaggaacattgtgggacatgggtatcctcagccacagttctgtggacaggaagaccctgggcctctctagtttctttctttcttttttttctttttcttttctttttcttttttttttttttttgagatggagtttcactcttgtcacccaggctggagtgcagtggcacaatctcagctcactgcaacctccaccttctgggttcaagtgattctcttggctcagtctccctagtagctgggattacaggcgcccgccaccacgcctggctaattgttgtacttttagtagagacggagtttcaccatgttgaccaggctggtctcaaactcctggcctcaggtgatctgcccacctcggcctcccagagtgctgggatcacaggcatgagccactgtgcctggcctagtttcttaattgaagtaaaacagagtaagatggcatgcagggctaatcattagcccagcaggtaagcaccatggctctgcagccagctgcctccttagaaagtggggtgttgccccatggaagtggtggcatgctcttctggtagcattgttgaaatgaaaacaggttcagtccttgatcactaggctttttgtacccgggtacctctggggacttggcagagagtttgatctctcagtgtccaggggttaactttctacctgagagtagcaccccatgcttctccagcacctgctcctaaccaggaaattggggtagaccagaaccccagtcttcccagcagctcagtgtttcttgccccggagcatctgccttcatcacagtgactctgaacacgctgccatggtgacatctggtaaaccttaggatggccatggaaaacgactctttgccctgtttcttcttggcttcccttgcgtacaaggatgaaggaggtggtttaactttatttttgtcctttactttttaagtctaaagtaagtgcttgaatcgggtgggttttcatttttttgctttctcacccctcaggttggcccctaacttggcctctcaccctcgtgtcagctgttagacactgactcagtggctcagaatatgaaaggctcaggaagtagcatgctggccccacctccctgtccccataccttagcagagcagctgcccagcagggcctccttctctttcctaagagtttactccatccatggtgggtgtcttggtaggcccgagatacgagagggagtgctgctgttacaagaatttacagttgttctcttcagcacagaaatgctgtaaatggcctctttcgatactagtttatgaaattataagtgtctgatgattgtgcatctttggtttcaacagctactctgacctacgacactctccggtttgctgagtttgaagattttcctgagacctcagagcccgtttggatactgggtagaaaatacagcattttcacaggtatcggccatgctggagcccaccctggtctgaccgcttggcctgcagaagcattttgtgatcactgttctctgctaactctgccataacttgtgacttgcaaacttaaggcgttgtgtgtgtgtgttttttttcttttaaacaacctctagaaaaggacgagatcttgtctgatgtggcatctagactttggtttacatacaggaaaaactttccagccattggtaagtactctgttttattacaacgcgggacaaaatatgtttttaggaaggaggaaaacttacgcttgtagatttgacttcaatatgccactgacttcatttgaatcttcacagcaatcctgcttaactgaattggccgaggcctcacgtgtagtagtggcaaagctagaatccacggcgcctgactctaggctagtgtgttttcaactgcaaatcccagcttattactggagctggaaatcagtatcatgagttatgaccaacgttgttttaaatgtaggacagaatgtcatagaaagcggtgtgtgtccgccacgggcacgcagcatggcgcttcagggatcttcgttttcgtttgcatgtttgagtgtgtgttctgggtcacagctgtacaatgtgtttcttacttaggtccagaatgtttggaagccattctctgtagccctcatcttttttagtattttccacacttaacctgtggggagatttgaagggccaggtgaatgtgacatgtttttatgtaacactaaggtgcattctgttaaaagccattcatcattgttgtataccctggagctggaaggagatggggactggttctcagccttgcctctcaccggcggagaactgaggccggaggtgagggccgggctggcgtcatgcttcctcagtgccaggtcagggtttggtccctcttctaggggtggtttcattctttatcctgaagtgaggtggaagtcaaatagccacaacggctggacattggagaacactgacgcgtagggacatacgacagtgtctccttaggttgatatttaatgatacaccttgtgagatgtaccctgggaatattgatatgtaatgatatattttaatgacataccttgtcagatgtgccctgggaatagttgctcattccacagtttccgcttgtttcgcagctgcgctgaacctgctctcttggccgccttggatgcaggtttgtccccagcctccatctccttcacagctaccctgccgcgtgctgggaaggagaacaggactggagcgaagcctttctggtttggcagaggccttgtggaggaggtagaggctggggatgagcctgcacatgaagcagccctgtcgcagttctgaagggcagtgtgctgtgtttccttcttagccccacggagataattttttaaaattattactttcatttttttaatagatggggtttcgctatgttgcccaggctggacttgaactcctgggctcaagcagttctccctcctcagcctcctgagtgtctgggactacaggtgcacaccaccacgcctggctctgagatacgtttttatcagcagtagagcgatcagcagtggagcgagggtgaccatgggcactgctgattgggttgttggtgggtgacggccaccactaccccaagacacagggtttattgtccgtgccagtgcatggagaagctgccggaagcccagaggtgggcacagggcgaaccttgtggtctgacccctgaatctctgcttctcaccctggtgtgcagccacctagcagcctcttgtctgctgcacaggtggccctctctgttgtcacagctgtgcagtggccttccactggacccctgctatgggctggcagtgtttcccacgtgcctgtcacatgccgcgcagttccatggtgcatgttgtccatctttctgggccccagggagtggccgtgagggcagggcccaggcacctgtgctggaagggctgagttgctgcccttgcggcccttcctgtgctctcagcagcactggatgtcatcaagcgtttgaatttctgcctttctgataattggaaaatgcgttgttttgtttaactttgcattttctggatgacttacgggggtcagtgtcttcatatgtttgtcagacattccttttgctccgtgactgacttgttcatgtgttttgcccattttgaggaggttgtcgggacatttcactctccagtaaatgtggcccttggcgttactgagtcctaagaggtgtgtgttgccccaggtggagctgatggaggagggagtcggtgcctgtggtgtgggactgaccggctgcctcctgccagtgggcttgtggcctgtggggccatctggccatgagcacttctctctctgtctgccacgacaggggggacaggccccacctcggacacaggctggggctgcatgctgcggtgtggacagatgatctttgcccaagccctggtgtgccggcacctaggccgaggtgagtcacagccctggggagggcgcatggccacggtgttctcaggaagcaaaggggactgtggggtcagggctctttagagcagaccacaggtaaaacagtaagtagaacttgggggtttcttgagtaatgagccacttgtttttcttgatttaaaaaactgactttaaagaatgctaataaatccgcatgggcaacatggcgagaccccgtctcacaaaaaatacaaaaattagccaggcgtggtggctcctgcctgtagtcccagctacttcggagactgatgtggagaattgctagaacccaggagatggaggctgcagtgagctgagatcgcaccactgcgctccagcctctgcaacagagttagaccctatctgaaaaaaaaaaaaaaaaaaaaagaagaagaagaatgctaataaatgttttaaattactgaaactgttttctgtacagatttgttttgataacttggcgtatatgtatttgaaatcctggagaacatgggtttttacttttaaaagattctgggctgggtgtggtggctcacgcctgtaatcccagcactttgggatgccgaggcgggtgggtcacgaggtcaggagatcaagaccatcctggccagcatggtgaaaccccatctctactaaaaacacaaaaattagctaggcttggtgacatgtgcctgtagtcccagctactcgggaggctgaagcaggagaatcgcttgaacccgggaggtggaggttgcagtgagccgagatcacgccattgcactccatcctgggtgagagagcgagactctgtttaaaaaaaaaaaaaaaaaaaaaaagattctgaaaaaggtttggatgccatctgtatctttagtgtgaaagtgaaaacttgtttctcatatttatggtagagctgacctgtaattttttttccaatagattggaggtggacacaaaggaagaggcagccagacagctacttcagcgtcctcaacgcattcatcgacaggaaggacagttactactccattcaccagataggtgggaggctgcagaatgtgccaggccccacccgggctgtctggagagggtggagtggtcggtttcccctcagagcttttctggtgtcgtgggatgtggagcaggaggctgtaaacctgtaaacactgacctctgaccatctgtgcgctgctgtcacatcacccccgtgtcatcccacatcacccccgtcccacccaggcccagaccctgggccttgcccttcctgctgtccatgcggcttgcagtgcctggtgctcggcacagtctggggaaattggcctcgccccatcagtgaatctgaatgctcagattgaagtggagtgagtaaagaagagttggcctttcttgcaagcaaggccggcttttgagcactgtgttttcacttatagaaggaagtggtcccttcatttcccctccttttctaagttcatagtgaaggacagtccctgagaccttgtttgccccctcatgcctcccccgatcttgttggggcatccttccgtctggaggctgggtcgggtgctgtccaggccttcctgtgacgtgtctcctggcaccacgtgccaccagaggtcagggctgggggcgggtgtgtgttgctaatgtgtatctgttccctgcagcgcaaatgggagttggcgaaggcaagtccataggccagtggtacgggcccaacactgtcgcccaggtcctgaagtatgtactgcgcttccactgctgagcatggggcagcagggatgttccctgggggttaaattctccttgagtcttcatggctacaggaaataaggggtctctaattatttacttcatggccctcagaaggtttctcagcgatgactgtgttgaggtcttgtgaataggaatttatgttttctaacaaaatgaacaccgtagtccacatcctggctggcacattggacccttgttctttgctgcatggatccacctgtaatggtggcttctgatggggtgggcagctgaagctagtctgcagccatctgtgcgggtgccgggcccttccacctctgcaggcttgttggaggctgccctccgcgggccttgccacctgcctttctcactctacccggagactccctgtagcctcgctcaccttcccatacacctcagcgtctgaaagtgtgctctgcacctgctccgcaccgcttcctttcgcacctcactcagccccattgcgtgcccgccccccagattcctctgagatgaccttccctgcagttccagaaacttgcctgtggtttcagcttcgtgtccactcttcactcctcttgacccatccagggtcatttggtctgattccatgtgtcctggcatcccagcatttttggggaggctctggccagatcccccaggacttgtcccctcagggtctcctccccactggtctgagggccagcgtctccccagcctgtcttcagccacggcccccttgaagcctctccttctgcatctgcctgttctgtatcccactcaaggccctcaggcatcccacgttccacattcctgaaatggccctgtctcccctcacccacagcctgctcctcagcatggcagtcactgtctccacccagcttttctgtcaggttccctggggtcctgcacaagtccgtctctgccacatcccacgtcacccgcgtcccacgtcacccccgtcccacatccccagcctgctgctccctctgtctccagggcccgccctgtgtttggcgtggcacctgctcagtccctactgcatgcccttcagagtcctctgtccagcagctccccagcccccaccacacccttccactcacacttctcttgctgctgcctggagtggccccaccaagtcagcgctgtttctctggaagcaccaggccactcgccatgctcgctgtttctcctggtcccctgcctgctccccaccagcccccgcccctgttgctggatgatcctccccaacctgcaagtgctgtggcactcaggcacatggacggcttccagggctgatttgtccctggactccaagctcaggtccagctgcttattctgcatttccacctgggtatctgtgtgcatggtgacctgacagccagagcccgtgctggccccagcctgcttctcctacagtggtccttcaggtgctcaaaccaaaatctgggattgttctagacccctctttttgagacggagtctcgctctgtcgccaggctggagtgtagtggcatgatctctgctcagaatcccaagtgattctcctgcctcagcctcccgaagtgctgggattacaggcgtgagccaccgtgcctggccaggactcctctcttttttctttttttttgagacagtctagctcagtagcctgggctggagtgcagtggtgcaatcttgggctcactgcttcctccacctcctgggtcccggttcaagcagttctcctgcctcagcctccccagtacctggaattacaggcacccgccaccatgcccagctaattttttcaatttttagtagagatggggtttcaccatgttggccaggctggtcttgaactcctgacctcgtgatccacctgccttcgcctcccagagtgctgggattacaggcgtgagccaccgcgcctggccaggactcctctctttcttttttttttttttattttttttccgagacagagtctagctctgtagtccaggctggagtgcagtggtgcaatcttgggctcactgctacctccgcctcccgggtcccagttcaagcaattctcctgccttagcctcttcagtagctgggattataggcacatgccaccatgcccaactaatttttgtatttttagtggagacaaggtttcaccatgttagccaggctggtcttgaactcctgacctcgtgatccacctgcctcatcctcccaaagtgctgggattacaggcatgagccaccgctcctggccaattcctctttatttcagtgggcccattcaaaatatcaattcctctttctttcagtgggcccattcaaaatatgtccagactctgaccagtgttcatcctttcactccctgtgctggtcccagccccatcttcttctttcttgttgatcttccttctctctttgtcatcctagagtctctttagcaaataacagcagagccatctgcataaaacatattggccactgctctgccttgaaccgccctggctcttcactgctgactcaggcggggctctacccgacctccctggcatgacacgttgtgctcctgggacacaccagcctcagggcctttgcatgtgtggtgcctggcacttggaccctgttcccccgacacctgcctgggttgcgccccatgtctgcccaggtaccctttggcaccaaggtcttccctgtggctacgttagtagtgccactccccgttcctgcgttactgttctctgcagtgttgaccaccggcccacgtggctgctgcttccttgtttgccctccgccaggtcagctttgccagtgctgctgtgtcccttgtgtgtgggtgcgtcttcggcactgcatctgggctagaggtgggaggaggaaggtggtgtgggagtggggcggggaagcaggctgtcctcccatcttcagcactgcagctgggctggagatgggaggaggaaggtggtggggcaggggggcagtggggggcaggctgtcctcccagtgtcccccctgggcttgtgcattgggaggggctctgtgtggtcaccccagtcccctgctccacccccacccagctcccctccacaggtcttgcattctgtccccgggagcaccaggtctttgctgcctcagggccttttctattgttttaccttttgttgaggtcctctgaccccacctccgccagacctgagatgagatcagagtcgtgttagacttttggctgcagaatctgcccttccctcagaaggggaaatccaaggccatggttcctcctcactggcgtgcacagtcgtgcttcccactaagctgcagatttctctataaggactcagattccttggttgtcagctcagcgtgtttggtggaggggagagcagagcagagcgtgaaggtgctgggaggcctgcctcaaagttggcaaaacccacagcgtctcagagctgcgttcatgttctagttcctgcctctgtgccagtgagaccagaaaaccaggccactcaaaagcctcttgcgtgtgctctctatgaatggaggctggggcaagggcaggacccctgggcctcaggcgagaagaagcagatttaccctcagctttcttcctgtctgtggcattggctgtgccccggattttaggagccttggcccttctcatccgagaagcacctctaacgcgaaccctccttcgcgcagctatagctgcaaagatgaaccgtctttgaattgtacaaaagcttatggtcattctcctactctctgtaggaagcttgctgtcttcgatacgtggagctccttggcggtccacattgcaatggacaacactgttgtgatggaggaaatcagtaagtggctcagagtttccatggacaagaaagttgaaatcacgggcaacatacacacttcctcgcctgagtccccacgggagcctcggcgagtgttgtcagtcgccccatgccgtgcaggtgctccgtggggcctgtgcgccaagccagatgcacggtggcctcgctctcctatcccggcggtcataccaagagaggagagcccaggctgtctggaggccgcgacttggtatctcacgtcgtgttttgtgtcttggttacaaatcgtttatgaaggccctgctgtgcttaggcgccctcgtgtgggaattctggtgaagttattttgcgtgccttgatgtgcgacagagagatgtagcaaccatctctagctgcaccatctcgagcaaaggcacgtcgtgaaggcagagctcttttcagctttctggaagaaaggtctgctgcaaccctgaaggaacctgggcgtggcaacatttacatctaggaggaaaactgtggctcagttttaacaaatgggctcattgagtgagttccaaattcatgtttcaccttccatgatgtagccaagctgagaactcttaaaaatgcctcattgcctttttcactcagggccacctttttcccaaggaacttctcaaaactccctcaattccaattttattgaagttctacatgtaggctattgccttgaatccaattttccataagaaagagctcatttaggccgggcgcggtggctcatgcctgtaatcccagcaccttgggaggccgaggtgggtggatcatgaggtcaggagttcaagaccagcctggccaacatggtgaaaccccgtctctactaaaaatacagaaactagctgggcatggtggcacgcgcctatagtcccagctactcgggaggctgaggcagaagaatcgcttgaacctgggaggcggaggttgcagtgagccttgatcacgccactgcactccagcctggccacagagcgagaatccgtcccccgccccccaaaaaaaagacctcattcagagccacagccgtaactgcgcacagattcacagtgggagtgggtcctgccctgtgactgtgggtgtgccaggtcaccacacaggtgtgtgctgggtcacagacacgccccttccctgcctctccattctgtttcttcatcgtctggccatcctcgggggcattgtgacacagcggagggagtgaggcaggactttataagggagagtgaggctggcttctgcagcattgagagctttgccacagcaggctctccttccaggattctgttcctcagagacttgaacttgggatcataaccaaagggtgtttgtttcttccatctgcctttttcctccattctgtttcttgaaatttttataaaacattggaaacacaggaagagtacaaagaaagagaaaaattattgattttaccactcagaaataactcatatgagcattttgacattcttactctcagtatttctcctgtgcttttcaaaaacttacatagtttcctaagtattttctcctggccatgagtgacagcattgtaattattaactggctacacaatatactattataccttagttccctgttcactgccccatcctccctcccgtgtttggggaaatcacttaccccctcgttccgcacgcgtgctcaggatctcaccaagtcacacctcagtccctggcctcggattagggaggctgttgctgggtgcagtggccaggaaggcgcaagggtcagggcttcctagaacctccgtccctctgggtgcaggtagcactggtgggagtgttgggggcagcttgtctgtgtggactccagctccgtcccttcgggagtctcagggctgcccaaagcagtgctgctgaaacgtggcttgtcagagtgagagtggagtcaggtcctggaagagcttgaatctgcatttcccagcccctggggatggtggctcccgggaggatgtggaggctgcctggtctgactggcttcgtctcactgcgtcagctgcctgaaaggacactgttcctcacaggagcatgtggaaggtgcctgatgcccccatttaggaagaaaggcatccacatccagccagcaaaggcactggcattgatgcacaaggcttgggtttctgggttcctgagtgtggcgtggtgttgtgaggaggacatcggggtcgttctgaatgacccctaccaaaagccccaggagggagtagtggggggagggcaggaagcaggctgcttttttcagtcgtgctgctaagagtgcgcaagggaggacgtctgaggaagaagtccgcaaagccgaagctagagaaacagacgtgtccttggctaagcaaggacttttcttctagtttctcggaactgcttgtggaaggagcagttagataggagaagactgatgccattcagaaattccactaaagcttcttcctgcagcgaaagagctgcctgacggtgttcccactcagattttaggtgaagcctgtggggtaaggggagaccttactgcctacagtgtccccatccaccaacccatcccccccgcaactcatccttctgtccacccccagtcaaaggccagccaggacatccttagcatgctcttcttgtccttaacgttgatgggcttagacctttctaacgacagtagacagaatgtcactgaatgtagggaggaaatacagattggaaaacgtgtcagtctggcagtgaggacaaatgactccaatgaaagaaaagtaaataccagagcaagcacagtcagaaacagagtggggaggagaatcacaatagctggaactcaactctctgagaggcagtgcagccaaatagaggcagctgagagcagagtatgtggattagaacttttcgggagagttggccactgaaggagtaggagaaaattcccctgagttggtgagagttgagtctttagagctaaagacccccaaatttttttatcagaagtacttaaacatacatgttcctgataatatttccaaattgcagaagtaaagggaaacttctctaaacatccaaataatagtatcactactaagctgctttgaagaaaggcagtctcaactggcctgggcatctcatctttgtgccataccaaatgctactggaaaatgtttagaattctgagaaaagacctggcttcatgaggtgagagtaggtatgtgtactgtgtagttgtcattgatagagaaatataaattttaaatgtgttcaaaatataaagagaacacgagaaaatttcaggtggtggcaggaataggcaaaagcccgttgcaccctgttgacagcagggtgtttgtgacgtggtaggtcacacactcagtgctgggctctggaggcacagaagcaaccggcccagctacgcatcagcccttgagccgattcatgtgttcgatcatattcctgagacagtagggtctgtgcaggtaacaaagcaccagtcagcaggaaactcaccaccgggaagcctttctatcaaaacataacttcaaaatcagtaaagtgggccgggcatggtggctcacgcctataatcccaacttcaaaatcaataaagcgggccgggcgcggtggctcacgcctataatcccaacttcaaaaccaataaagtgggccgggcgcggtggctcacgcctataatcccaacttcaaaatcaataaagcgggccgggcatggtggctcacgcctataatcccaacttcaaaaccaataaagcgggccgggcgcggtggctcacgcctataatcccagcacttcgggaggccaaggtgggtagatcacatgaggtcaggagttaaagaccagcctggtcaacatcgtaaaaccccatgtctactaaaaaaaaagttagctgggcatggtggcacgccctcgtaatcccagctgctcgggaagctgaggcacgagaattgcttgaacctgggaggcagaggctacagtgagctgagatcatgccactgcactccagcctgtgtgacacagtaagactgtgtctcaaaaaaccaaaacaacaaaaaataataaaaatatatagaaaacagaataattaacagattagctatggaaagatcaaagctacaggggacccagataacacaacaggcagagtttagtagatacgtgtcaaaccctagattgtgacagcagagtgtgcctgggaatttctatgaaactaatgcggaataaaatgaaaaaaggacaaaaccctgctgcctggaaatgtgaaacctcaaaaaagtcaagtgtagagaccgtaactatgtatctgaacctgatgtgtacagaactcagaagaaaacctgtgtatcttcagtactagtatatgggttctttacaaagtgaaaattaatgaaataagcatacaactcaagaattcggaaaaagcaaaattaactgaagaaaccaaagaataatattaaagacaaatacagaaattaatgatttaaaggaagaaatgtattaggccaggtgtagtggctcatgtttgtaatcccagcactttgtgaggctgaggcaggaggattgcttaaagccaggaattcaagaccagcctgggcaacatagccagacgtctattttttttttttttttggaacagttctgctctgtcgccaggctggagtgcagtggtggcacgatcttggctcactgcaatttccgctgcccaggttcaagtgattcccctgcctcagcctcctgagtagctgagactacaggtgcatgccaccacgcctggctaattttttgtattttagtggagatggggtttcaccatatttcaccatgttggccaggatggtcttgatctcctgacctcatgatctgcccaccttggcctcccagagtgctgggattacaggcgtgagccaccgtgcctggacctcattctataaaatattttaaaaataaattttaaaattaaatttattagaactaacacatactagaactggctctttgaagcaataacatatatgttttaaaaaaatcaaagttaaaatccctcccttggctaagcactgtggctcccgcctgtaatcctagcactttgggaggtggaggcaggcagattgcttgagtccaggagtttgagaccagccgcctaggtaacatggtaaaacctcatctctacaaaaaaacaaaacaaaaaaactagccggacatgggggcatgtacctgtagtcccacctactcgggagtctgaggtgggaggatcccatgagcctgggaggttgaggctgcagtgagacatgattgcaccacttcactccagcctgggtgacacagtaagaccctgtctcaaaaaccaaacagaaacccaaacaactcccttaaggctgggcgtggtagctcctacccataatcgcacctctcagggaggctgagttggaggattgcttgagaccaacctggacaactccctctctataagaaatagaaaaatgaggccaggcacatggctcatgtctgtaatctcagcacttcgggaggctgaggtgagcagatcacttgaggtcaggagttcgagaccagcccggccaatgtggcaaaaccccgtctctactaaaaatacaaaaattagctgggcgtggtgacacacacctgtaatcccagctactggggaggctgaggcaggagaattgcttgagcccagaaggcggaggttgcagtgaaccgagattatgccactgcactccagcctggacaacagagaatcggcttcaaaaaagaaaagtcagggggcacagtggcccacacctgttgttccagctactcgggaggctgaggcgggaggattgcttaagtgcaggtgtttgaggctgcagtgagctgtggttgcaccactgcactgcagcctgggtgacagagtgagaccccgtctctaaaagaaatttaaaaagttctgtctcagaatccttgttttccagctgtctgttttgagaaatttgagtcctacaaaaaagttcagtgagtcatggccacaaaccctccacctagatccaccaattgtgttttgacacgcttggtttttatgagcaagcctcctacgaatgagagtgttcctgagagccacacagcctcatcaccacaaaagaggtgacgccacgactcaccagggtccgtcttggccccttgctgtccagggaacaacccgtgccgctgatttgtgttcctggttgagggtccggtgctgtgtgtatatagttgtgatgtctttctagtctttaattgagaaggttctgcctctttgttgtggttgttgctgctttgtggcatttttgacgagttcaggtcagctgaccatcccacacgctggatttgtctgcttcctcacagttgggcttgggttgagcctgtggctgagagtagcctctgggtggcagtgtcctctgctctcccatccggggcctgcagtgggacactatgtcagatccccggagatggtgtcttttttcctttgtaattaatgaataatccagtggtgacactgagcatgtcctggtgagctgtgtgactcctgcctgataatggtggtttttctagcctgtcctttcctttcacgtttattggttggcgttctgagaagagccgccttttctcccatcacttagtgtgcagtgtgctacctgtcacctgtctgtcacctgtcagtcactgtcacctgtcactgtcactgtcacctgtcactgtccatctttttgatgcttgacggttccacctttggccggtggccacctcagtctggtggtgtcttttgccgtgttctggcgtttttcgtttatgttttgagccctcccttatgttctgggttaagcagatgctgcaggcacctctgaacattccctgcctggccctggaatcagcctggctcctctgagtggggagtggtgttgagaaacctcgatctagacgccgggcatgctccatgctcccggagtgtcttctcccatcaccgcaccctccggttgatgtgtcctccggaccattgactcacgggtgtgtgtaggcagaaggggtggaagcgaggaaaggcgttgctgaggaggcccggagggagcgggttctggctgtgctggcactagccaggctggcaggctgcgtgggtacttctgtgattttcctctcaagtgcacgtggctttttcttgcactgtttcgtgtgtgtgctttatttcacaataaaactcttgaattaagtatgcatagaaactatttcttttttctctgggtggcaagattatgaaaaaattttcttacgcttttctatattttccaagtttgaatttcactgtaagcacctggctttgtaccgccctttttctgttacacagtcatcatttgcttgcttgttgtgggagcacttttgcacaggtctgcttggttagtgaaagcatgtctccctttctaggaaggttgtgcaggaccagcgttccctgtgcaggcgccactgcgtttcctgcagattccgaccggcactgcaacggattccctgccggagctgaggtcaccaacaggccgtcgccatggagacccctggtacttctcattcccctgcgcctggggctcacggacatcaacgaggcctacgtggagacgctgaaggtgggtcctgccgtgcggcgcttgccctgagtccccgtccccttctcccagttcttagtcactttcagcgcatcgtcgtcacgtggccatttgtgcagccggctctcgggggaggggtaaacaaccctggtttacaccgttgcccaaggggtgagtgggcgtgaggcacgtccatcagtaggcacgtgctgctttcgttctgcaagtgtcaaggcgagtgtcgaggatgaaagcatgaggcgcttgcagggggtccttggaaccaggtgccactcctcggcctgacggggagccccgccccctcccgggtctccactgtgccccaggcatgcccaccccactcccccacagccctcttggcctgaggtcccttcggagggtgggttggcctgtgaggaagggacgtgtgggcagggcctggggatgggcagggctgtgtgaggagctccagccacaggctcccccatgtcatgaaagcaaaagggggcggggagcggtggctcatgactgtaatcccagcactttgggagggcaaagcgggcagatcacgaggtcaggagtctgagaccagcctggccaacatggtgaaaccctgtctctactaaaaatataaaaattagccgggcatggtggtgcgcgcctgtagtcccagctacacaggaggctgaggcaggagaatctcttgaacccaggaggcggagcttgcagtgacccgagatcatgccattgcactccatcctgggtgacagagtgagactccatctcaaataaaaaaaaaaaaaaagcaagcagaagggaaaaccatcctttcttcaggtaactcaaattttagaccaaggagtcacatttgtatggaactgaaatgtggcttcctgttaaaattattcagttgtctgaacttggcccctccgtccagccttctgcccatcctgtggggtctcagctgcccccacacataggccccgtctccatcgcttctgccctgtcaggtcaaagcactcagcagggccacctcccgcacccctgctcacatctcctgccaggccccctcactcccggcctccccaaagcccacctctgacatgaagcttccctgagctgagcctgcagattgggtttcttgtgcctgtgggatgtcctgtggtctttcctggacagtaagctctttggtaccatgtcccctcctgtcccctcttgtgtcacccagttgggcctcagcaggcccttgggccccctatggcagtgggtggggggaccgtctgctcccacctgggacctgtgctcagtcccccgcccctccacagcactgcttcatgatgccccagtccctgggcgtcatcggagggaagcccaacagcgcccactacttcatcggctacgttggtgagtccagggttcccaccgtgtccctgtgggcctgggccttttaagggcattccatgagcaggtaccacaccccaggtgaccacttgaggccactggtggaaaagcagcatgccctggggttcattttcagcctggtcgcgggcggcctcctgtgtgcccctttccctgatggtctggtgccctcggctccctccccacctcctgcccactgcttctcagtgtgatgtgggtgcagtgggtctgaaatgcggcctcctctgtccctttcctctgccggctcggccacccacctgcccacctgcctcatcctcccaggtgaggagctcatctacctggacccccacaccacgcagccagccgtggagcccactgatggctgcttcatcccggacgagagcttccactgccagcacccgccgtgccgcatgagcatcgcggagcttgacccgtccatcgctgtggtacgtggcggccacctgagcacacaggcatttggtgctgaatgctgtttgggaatgacgaggaaaactttcggatttttgcgttttttttttcagcatgttgggataagtactgtgttcacgtggttgggaatctgaagggtataagagccggaactgtgtccttgcaccctcacgtccctcccccaggcaccacctcctgtgcagccttcatggccttcgagtggcccagagagcgtgtgtctggatgtgagcgtgtgtgggcgcgtgctgagtgtgcatggatgagtgtgagccatggtgagtgtgtccccctcacacctacatttaaacacacgggcggcccctccacccacccctgcaccaccttcgtcacacccacatttaaacacgggcggcccctccacccacccactcctgcaccaccttttgttttccggaggctctgacttgacctctctgggggatttcctaagaaggagcttccctgtttttccattttgattacctagttgtgatttttggtgtgtgatttatgcagacctgcctgccctcaaatatatttgatggggaaagaggccaaaaaacccccctagaaatcatgaatgacggtgacatgctcagggaagcagttaaccgaatcgggggctctgttgtggatgctccgccccatttaggaggaagaaggcagatctgggcctgaaatgggacggtctctgagctgtggcgcagccccagagtgcacaccacgctccatgcacctcctgggcagggtggcagtagtggggaacatgggctggagctctgtggctcacactttttgtttgtttgtttgtttttgagacggagtctcactctgtcgcccaggctggagtgcagtggcacgatctcggctcactgcaagctccgcctcccaggttcacgccattctcctgcctcagcctctggattagctgggactacaggcacccgccaccacgcctggctaattttctgtatttttaatagagacgggttttcactgtgttagccaggatggtcttgatctcctgacctcatgatccacccacctcggcctcccaaagtgctgggattacaggcgtgagccactgcgcgcagcctggcgcacacttcttaccagaacctagtcacgaattcctcgtcgaactagaattaggtatgtttgttactgtaaacgcagcttggtggcttacagtgattggcactctaacagtcaggtcaggctagagagccagccaccgcagacagaggagtggacgcgtgaacgttgagttgagaccaaaggggccacctggtgggataactgtcctcacccgtgaggaggaggaatgtcccctgtccccgggggagagtgctcctacaccagcgccgaggcggcagaatggtgtcttcaggggaagagagtgcccagtttgagcttctccccccatttcgtttctttttgtgttaacatctgcgcatctggcagcgttgagaattcctagtgactgtcattacaggcggcagctttaaggatgtgattgccggtgacccttggccggtcccctgtctcctggctcctcagcaggaggctccctgtgtcacggtgtccttgggcagttctcggtggcctttgccgccaagcttccagggagctgctgggcgaaggctgagacccagcggccctgcctcacagtcacagagagaagagctccccacttggccctaactcataacctgccccaatcccggaacactcggtgaggtttgagagatgcacaccacgtaacatctcgtgggcgaatcaaggcacagcaacgcagtggagcctgaggggagccgggcactggtgcaggggaccatgcacagggcaccctcggagctccgttcctggccacaggagccaaggcaggctggaatgtccagcacctgcatgctgggggcctctgctgcgccactggcagtgggaatggaagcccccacctcttagccgactgcagatgggggtgtcgtgttctgctcatcgtcatttcgttttaggggtttttctgtaagactgaagatgacttcaatgattggtgccagcaagtcaaaaaggtttgtagccgccccacacccacagccgagctgagccacccagggagacaggcagtggggcgtgcaggggtcgaaggcctgcgtccaggtctcaggcagcctcactgggccgtggggagctttgtcccgcctggcacagctatgtagctgagcagggtggggcgtcctggattgcccatctggcaacacagttaacaaccctggggacggatgttgcgtgttgactttagaatgggatttccagtgtcctcatccgtctcctgttgagatgggggtggtgatggggtgctgagctacgccggccgagtgcgtgtggcccacccccctctgccgtggtggtcagactgtgctgtgtgttgatcaccacactgggttctcgtgtagcctttagtgtggagctgcctctgttttctcatcagtgagatgggatgacaggtttgtccgctggctgtggccggctggcccctttctcttggccgcagcaagcactggggtgaggctgcacctaacggccatgtctcactaacagctgtctctgcttggaggtgccctgcccatgtttgagctggtggagctgcagccttcacatctggcctgccccgacgtcctgaacctgtccctaggtgagagctgccaagtccaggtggggtccctcggaggtacgatctgtgcccttgcttccccagtcctggcccccttggttttgaccattaaggtgtgtgtgagcctgagccgtgagcacttggcagtggttcgcctgtgagaccaggtatggagtggagcgtcccctcctccaagcttgcgcccagcagcccaggacccacctcgtcttccccaccagcgctgcctgcccgggcgctgtggagctgggcgtgctaccatggagtcctcaggggtctggagcagacagaacatgcaggctctgtggtgacgcagtcctgggtgggggactggttcacttgggcaccactggccatgggtggcgtagacccctcggaccatggccagcgtgccgcaggagccggcctgggctcgtgcagtgaagtgagtggccgtgagcgcgtcctcctcatctctgtctccctgtgggaaactctacaaacaaggcaatggcaatggaaccactcctgatgaccacgagggtcagacgcgggacagaggcccctcaggcctgagattgtgccggccgccccctgccctcctcaccctgccctgctcctcttctctgctccctccccccatattcgcaggtctgcacaacccccggacctgttcacacccgcatggggacagctgtctgtgggctgcagagcaggcactgctcagtctgccccacgccaagggcccttgactcacacccaggtggcccacccaagatgcctgatgcgctatgtcctgttccttctagattcttctgatgtagagcgactggaaagattcttcgactcagaagatgaagactttgaaatcctgtccctttgaaaatcctggggtcgggggtggcacctgtgagagcctggggctcctggtgccgctgcgtttcatccatcccgcccgctcgcctgccgagggctgcgccccgtgctgcctccccccagagggccacccgctgtgctcgtggactgaggctgcgctgcccgggaggccttactgcttggtgtcagactgcccagctcagagtgcccgtcagggcctgtgcatccgcacgcggagccgtctgttaggagcttccagagtgttctctcgacactgccagccccgtgttagcacctgggcctcagtcccacttgctcccaggcgccggttctgtggttggtttggaattaaagtcctgtttgaagttgtcagacacagacatgaatttctgggcgctccctgagtcagagtctcagaagacctgtgcaggctggcgtgagaggagcggcagccacactgcggccccacgcccaaggactgggctgctctcgaggggggcgcgcccaccgctgtgtcctctctgcccagcctggcttaccaagggctacctcagtgggagatgaggttggaggaacgaaggcgaggttcctccttgctttggggagaaaagtattcaggaagtgggtgtgtgggaaacctgaagatggcgtgcacaggacacagcgtgggcggcctgggcagaagggcggctggctgtcctggagctgctgctggagcctgccctcagagtgtccctttccagtgctgtggcattctgtggcagcttccccaggtgtggtgacggggggggggcggggcctccacctgtgacagccaggcttgagggtggacggcgtgcctctcccaggagccttccccatgtccttgccttgctgagaattgccctcccatgccgctgaggtgttaggtggtttagggccaaaaggggaaaaccacttgagtcttgtggtgtgtggtgggcagacaccacagggtggcatcacctggtggcatttccagaacctcagccccgattccagcacccaccaccgcctgaccctgtgtaacctgctgtcccgggtcccagagtgcactctgccccgctgctctgctgcctgtcctgggaaagtatctttgccccactaggaaatgtaaacaggagggcttggggagcgtgggcacttttctcatgagcagctactgcggcgttggcaggactcgctgctgctgctgctgcttgtgtaggtcggggagccagagatccccgaggacgcgcgccggacagtcggcactgaccggcccacctggtagcagaggacacccccagccccccaagcattgaagacatagtgtatttcctcgtatcctttctcccttgggtgtagttggggtggggaagcagggaaggctggtgcgatctccattccttgggctccacgtccgagttcatggtgcgccgctgtgctgggagctgcagtggtaatgtgtgggacaccttgaccaaaggggagctttgtctcgtgtgttttgaaaaaggcttaatgaagagaatgttgttcattcttagtagtatagtttgcaattcttaatggcaaataataagtttcagtagaaaacaaaccttgtgtctattttttccttaagttctaattgaatgtgagttccagaaaaaaaataagtgaatgtttcagcccgttcacacgtaaaggatgtggctgcctgcgtggcgggctgtggggccctgagcaggtgtgtccccagccctggcagggggcctgtcctgcctgcagcctggctctctaccagccgtggcatcagccacctcatacaaccctagaaggaaaaagtgcaaggaaaataggattttaggaaagtaaaatggcggttcccatcttcagcaggaggaagtcacaggaagtgcctggagttgcagggtttgcctcgatttgaatcatagcaaagccttccccaagtgcgcagtgactgtcctggcctgtgggaggccatgcctggggcacagcagggggcttggtgaggacattgctcactctggccagtgcatccctgtgggcagccctggtataggtgtgaagggcccaaagccagatcggagggggccctgctgggtccccggtgaggtggctgaggacttgtggcctctccgatgctcgtattcgcttcttgtggctgctctaaaagatgatcacattcagtgcctggaacagcacagcctcttccagacccggagggcagacagccatatcgtgctgtgggctctaggggagaacgttgctgtgcctttctagcttctggatgccagaaactgcttggctcatggctctttcctccaaccacacagccagcaacatggcatctctccagcttttgctgttggcatctcatttcctgactcggaccgcctgcctccctgttatgcggacccgtgatgggccaggcatggtggcgccagcctgtaatcccagcactttgggaggctaaggtggatcacttgagcccaggaaagagaggctgcagtgagtcaagattgcaccactgcactccagcctggatgacagagtgagacccagtcttaagacaacaaaaaaaggcccctgtgatgacactgggcccacctggatagtccaggaaagtctcatctgaaggttcctcacccaggcccatcccacagcccctggcaatgcttacccaagagtgaaatccttttgttttgcctgggtttgtctcttggccacagaagggtgctgagacccacagctgctgcccccacagatgggggaccctgcctgccttctactccagcacactgtatgctgctgtctatgcggagtgtgctctgtgggacagattctgccaggagtgtcaaatcattccttctaagtgtcacttaaaaggggatgcaatgggctcggcatggtggctcatgcctgtactcccagcactttggggaggccaaggcaggtagatcacttgagcccaggagtttaagacaagcctggctggcaacatagcgaaatcctgtctccacaaaaaaattacccaggcacagtgaaggcctgtaggcctagctactcaggaggctgaagtaggaggatcacctg

SEQ ID NO: 49 - DNA, 199839 bp, Homo sapiens
  source 1..199839: mol_type = genomic DNA
gccagcttcctgagcacagggcaggccagagcaggacaggctgggatggaaaatgaagaatcagtgctttagccgacaacaaatgggagccgtttactgtttagtcactatgattagtgttcactagtactcatttctcttcgtctaaaaagtggccaacaccatctcttttccacaagcactcgggagaacattcatattcaattgccttcctaagacccagacggggcagcgctctccacaggccaccaaaaggtgttgcctgtttggtttcatcagtgattatctgtggcagcaagacaggaagttggaaatcaagtacctcaattaagtcaaggctgaccgtggaattagagaacaagtgtttgttaccccggccaggtcaccctagggaaaacaggcattctccgggattgaaatggtggtgtttgtgtggtaaatagttctcagtccagttcaaagccagcagcattaaggacacgccaccgccaccgggagctggagaccaggcgaagctgagctcctctgtggttcaccaacccctcaggccgcctaagtgtcttctgctgtcgcagctttggggacagaggggtttcggaaacaggggcctcttgtctgcaccctcccctcccactgacaggctggcagcccagggcagccacctgaggagcgtccctgtgtctctccatctgcagagcaggaaaagcctgcgggtcggtggcgccacgctggggcgagacccagcttcggctcaggagatctcccacccagccggactcccgctctctgcccgcggccccctcccacactcccacctcgccccgcgatctcactgccccatcgaggcttccgggcggaggagaaaagttttccggcaggaacccgggaaggaagccctgggaccctggctgaaactccgggtttccccagtgccgagtcccttccccgccgcgcccagcgcctgcgccccgggaggcggaagcaacaggggggttcctccccgcggcctctgacctctgccctctgccctctgcccccagggtctggggcccgggcggaggcgcgagggggcagggccggcgcgcgggtgcgagcgcgggtgtgggcgcggggccggcgggggctgcggccgcggggcgcatgctcacttgcgccggtgacgtgcgcgcccggagcaggggcaggagccagcggggcccggaggctccagagggcggcgggcaggggaggaggagactcgggaggagcagagcgcaggctccgccgcggccggggtgctccagccgagcccaaccgagcgggcggaccgacggggagagagaaggcgccagagcgcgcgcgcgcggccccgagcagcagccttgccgccagtggagcagctgccgacgcgcggggccgcggacccagcattcgccggccgggccgggcatgagcgcggaggggccgcggccgccccctgcaccgcccggcgcgccgaggccgtgaccggagcggggggcgcggccgcactagtaccccggagcccatgggcgcgccgagccgggcgcgggggcgctgaacggcggagcgggagcggccggaggagccatggactgcagcctcgtgcggacgctcgtgcacagatacgtgagtgctcccggcgcgggctgggggacccggggaccagacagacgcgggccggccccgcagcccggaccctgtggccggtccagccccggggtcccgggaggtctccgatgtctgggactcggaccgcccccggggacgagcgggatgctggggaggggcctcggagttgacaccctggggcttccgacggggtctaggtgggcacagcgcggggccccagccccgggcggccacctgctccctggccgcggccgcctggcgcccccttcccgcccgcagcgccctgggggtccctcggagaggctggctggggttcgagctgtcccggcggaccgggcgcccggagggagccaacttcgaccccgccggggcccgggtctggggaggaaccttcagatgcggcttccgcgcagccgtgtctgtaagattaagggattgggaggaagcgttacacttctgcagaaaaaggtagcaattgtgtttgttctttaacacccctgggggattcagaagcggagtttggaatctttttattttttaccttaaagtaaccaattagatcagaagtccggggtcttcttgggttcctctggaatttgccccttcagtgataagcaagtgaagagctcaggagggaagactcggaaggggaaaagttgattttgttttacaccagaggaggggaaaccggaatccctggcgttaggtgtaaaaaggggtgtgtggccgggcgcggtggctcacgcctgtaatcccagcacttttggaggccgaggcgggcggatcacgaggtcaggagtttgagaccagccggaccgacatggtgaaaccccgtctctgctaaaaaatacgaaaattagccgggcgtggtggtaggcgcctgggatcccagctactcaggaggctgaggcaggagaatcgcttgaacccgggaggcggtggttgcaatgagccgagatcgagccactgcactccaacctgggtgacagagcgagactctgtatcaaaaaaaaaaaaaaaaaagggtgtgtgtgtgtgtgtgtgtgtgtaggagaggaagaaaactgtcccaagcacagcgtttcctgccactgtcttgcacaagaggcttcattgttccatagaggctggcggtcactggtcaatcacaggttcgagaagtcgcatgcaccgggtttgatactagagagggcagtattatgggaactttgttctttcccggcataggaattacctcaggcagcctttcatatttatgagccttctttaaataggagaccttggccaaagatagataggtttcttttcagtgggggatgccagatcaatgctttcccccggatttatttattaaccaaaaacctcggagagtcaaggagacttgagtgcaccttacatcgtttcctgatctcggggaagccttaggaaggtcagcctgacttacttaagtggagagaactcacccctggtgattctgatgattccgatgctagatcttgaaaggcttggctccaggagccttgtgttactccctcactggtgctcgagcccccagttcaaatcctaatgtgagtggtaaacctgtgtttcactgtggtaacgttatagaagacccaatcacagtgactataggtaacctgcagtgtaagagaaatgctttattgggcggaagcttctgttctcagttgtgtcgctcagaagtgtgggtccctagacaccttattttcctgctttgtttccttcgagcgaaatggaagagggaagggactaacactcactttgcccgcggtgttcccagttcattccgttcccttctaacactcagtgttaaaaaggagggtcacgttgtggggctaatgtgcagcctctttccatagaaatgagagatggatgggccagcccggctcaccctttggagaatccccccttcccagccggtttctgaccccttcatcttgggagggggacagacagacgtccaattttgatgcttgactccctttctccaggccttcagctgttttctgttatatagatctatataagtgtttgcgtagcttgcatttttaattcccctttgctgtattattacgcttatggcatcacattttcttttaatctaagcggtaaatattctttagtgaacttttccagcatatacattattggataacgtctcgggaatacgagttgtgggataatattatttctgtttttctcattccacctgtgttttttgcagtgtattcatctggctacctcacccatatttacacacagagccattcatctctatcattttaagttcatgtctatggtattaaactaatttgactttttccagaaacagtcatgatctgttttcttgtaattgcgttatcgtccactatgtaggactaaattatatttccttttgctacagaaaaaagagtctgggattgaatactcatatttcctcatggtttccttatgtgacttactttattaaaaaggatagataaatagaccctgttccttcttggtgttcacatagtcagaattcctgggacaaagaaagctttccagctccttctgatgtgtgagggtggctaaaagataaagaagtccttggaaaacattgctgtaggcattttattgtggattaaccctggagagatagcagaggcaaatgagtgagagaacagatgaaggttaggccagggtagccaggtactccacactgtgtgttactggtggtttgggtgtttggatggaccggagccatgcagagatactttgtatttgtaaatggtgccgtgtttgtataccatgaggagtgcttgtgcttatggggtagtgtatgctccctggggtgatgtatgtgctctggggggcgtggggaaaagcgtgtgtgccgtggggtagtgtatgtgctgtggggtagtgtatgctccctagggtgatgtatgtgctgtcgggggcgtgaggtggtgtatgctctctggggtgatgtatgagctgtgggtacggggagaggggacggggtggagagtgtgtgtgccgtggggtggtgtatgtgctgtgggagccatggggtagcgtgtgtgccgtggactggcgtatgtgttgtggagtagtgtatgtgctatggggtagcatatgagccatggggtagtgcatgtgccatgaggtagtttgacctccatgacgtaacactttaaaagcacttctaggccaggcgcggtggctcatgcctgtaatcccagcactttgggaggccgaggtgggtggatcgcctgacatcaggagttcaagaccaacctggccaacatggtgaaaccctgtctctactaaaaatacaaaaattagccgggcatggtggcgggtgcctgtaatcccagctactcagaaggctgaggcaggagaattgcttgagcacagaaggcggaggttgcagtgagctgagatcgcaccattgcactccagcctgggcaacaagagcgaaactcgtctcaaaataaataagagtatttttaacagcatggatggagagcgagttccatttcctcttcagagctgtaaggtgagcaacaccgattcaggtagtttaagttccgagaggaaccagggcagcctcagcgggtagcttagatacttttcttagatactctctgggcagtggcctgaatgctgagtgggagcctccctgcccttcttagccatgtggccttgggcaagtggcttaattccttctgcctcagttttctcctctgagggtaagagcagtactcatttcatagctattgtgagggttgaatgaggtaatctgggtggagagccaagaatggggaagctctcagtccgtttgtcatgcctggctgttaacatagctgagtccctgggtagggttggctggggagagagcaaacctatgggctgccagtgctgctgctcagctacctgtgggtcccggcctgctggcgtcgtgggtcacaggagaggtaaaccgggcaccctgacactgagcatggtgtggagctcaggtaggattcagaaagctttacacgctgtggtaaaacagcccttgatctctgtaaggctgagcatcccggcgtgggcaggatgcttccctccctcttcccttccatgcctctatgtagggcatttgatttttcttcagagttctgtgggtcaagaactcagtcttgttatggtcctataatcttctttcaatgattcagcccagatattccttgttagttttgttcttttgcctgtcagagcttctgcttgtttctaccttaccattcttgcttcttaacattctaagatagaaaacattgaaggatctgaaggatttccttgctgacagtagataattactttcaacacaaactgttataagtttttttctaagagaaaaataaacatttttgcttcccgagaacttgaagcagtgctatattagagtgtgttaaaccttctagaaagtccagctatttatatgcatgcatacatatctgcttcttttatttattaccgaatggtgtataatgtgaacatcagtgttcaactgtgaggttgccccttctgaaagacagacttatttatttaactcagttatgccagcccctgttttaaaattttagaaatgccacataattttggagtttcttttcctaatccaggattagacgatccagtgggaccttgctgttgttcagctgctggagtctacaccacaggagcactaagttaagctgctttagctgccaaggtcttcaggtatttgaaataagtgaatcctgaggcatagaatccaagactaataatctgtctccagcagtgtggtggcaagcctgcagtacagactcgtaaagtgttcataatgaacaaatgtttaaccaggcagctcatcacacgaattcaccaagcacccttcttgtcttcagggcctcgtgtcttccacctggacattctaaagcagtctgcccagatgcataatttcacctttgtgtctacacaaaggttgaatcatttccattgctttttggaaccctgttgaatatctgcttattaggaacaagcatcttgaggtgcttttatttcttgccagggagtgaatttaataacctagagggaaaaaagtttgtattattaggtttggctatagtcagctaaatttctagggataagaacactgtcttcagtttacaattagttaaaactgtgttgaatccatgaataaaaatacatagttgcttaactacacatgaaatcctctatttacagatgtattaaaccctaaaacccaaaatacaaattgttctctggtgcttggagcatatgttcaatagaaacagggttaataaaagattctcaagtcccagacttatcaatgtttttttaaccaagttaaatgctggtaaaaatgctatttatttgcaataaaaatcaatagcaagcaagttttacagagtagaaattcaagaagatcagataagggatgattttctctttcacttggatattattatctgagaagaacaaaatggtacatcccagaggtgccgaggttaggcgtcggagtctgacagacccacattcaagttccgtctcggctgacggctgcgtggccttggcaagttggttgccccctgtacgcttggtgccccatctgcaaggtggggactatgatggtgcccacctggtgggtctgtgcagtgacgggacaggtcacggcgctcgtgcacgctgggtgcccagtgcacggggcgtctttgttgcgcgcatggacctgcggctgcatcaccgtccatgcttctgggcttcttaaggagaccgcctctcaccttgggctttccggaaccttctccccgcactcctcttcacgtggagagtgggtgaccttgccctgctctcccggggagagcggtggtcactggtgggaacgcccctgccacgcccagcagcctttctgcctctgcgcttgcctcctccggttggagcgagtgacccgttctgccgaagtccagtcccgtgtgtgctgcggccccgtctctctccctctctgagtgacactgtctgccctgctgcttgccgtcccgctgttggcaccgctttagaccccatatttcccagcggtcaccgtgctcatttttggcttccagctaccgtttttcttaggttaccccgcgtagctggcccgtccttccttctcctgtctcttctgtgcctaccgcggggggttcccttaccaaggtctccatcacccccaggcccacctccctcgggcccctctctgcccttgccctccacctcagcgactccgtggggcttttgtgatcccagctgcagttagcgagcgcccctgtgtgctcagagacacgccagtgagccgggaaggacagagacccaagtcccatccctctggggcccccttggaatgggggaggcgaacaggaaaccaccacagtgagtgttggggtgccccgcaggcgacggtgctgagaaaaagagagtggggttgggggcagtgcgtgcgcaggctggcgggtgggcgaggcgggtggaggatgcgtggggcgcagtgcttgcgcgcagtgggtggcggggtggacgaggtgagggcctggccaggtgggtgcctgcgtgtccagcctgaggggcggcccacgcagcagcctctgggagccctggggccttccgtgggctgcttcctgtggcgtcctgcgggctggccgcccctcggtgggctccggtgctggcctctgccttccccagggccacggtgggctcctagtggcctttcttccctctccatcaacatccttgtcccaggaagaggcgtccactgcctgctacacgccacccagccgtgttcatttccgtgttccagtgtcacccgtgtgcctagaacgttcctggcacagaaaagccacgcagaaaacagctgctgggccaacaccgagaccccaggtcattagtgttaatcagagtgatgaagaggttgccattggcaattcggaagggaattcagggagagcagccgcagtgccctgtccccagagcctggtgtccagagccagagttccgagggcctcctcatagttttaaaactctttattttatttttattttttatttttgagacagagtctcactgtgttgctcaggctggagtgcagtggcttgatcttggctcactgcatcctctgcctcctaggtgcaagcagttctcttgcctcagactcctgagtagctgggatttgtgccacgacgcccggccagttttttttttttttttttttttttttagtagagatggggtttcaccatattggccaggctggtctcgaactcctgacctcagatgatccgcccacctctgcttcccaaagtgctgggattgcaggtatgtgccaccacgcccagccctgaaactactttcattttaaaacgatgagttcctaagaactagactctgatccctggaaacaacatgccaacctctggcatgcaggacctttgctttccaggcaggcatttcccaattttgttagattctcaagggagcccctgcccctgctaaagttaagactcctgtgctgggacaggcaggctcctctgatgtggctgcacgggcgcactcagcagcctcgatacaatttgaacttcttgctgacatttgaacacagaggacggcacatacatccccacatttccccacttttttggaagtctcgtgactcctggcctgctggtttcccgaggaccgcttctgctggagcgatggccacttggggagggtcggtgctctccactggcctgagttgctgggcccatcactgctgcgtcgaagcctgagaccaccccacccggtcccaaggaggacacaggcttttctggtttggttgagacttgcagagcctaaagaaaactgctgagttgtttttgcgagttacctaatggtgctttagctgctgcatgcttttgtcccatggtgcgtttgtttgtaattcaccacagctgtaattgcagcagagccagagagctttctccttattacatatcctgagaaggaagccctggcagcccgacctgagagagggtgatgtggctcactcatgcagggatgctgggacatcaggctgggagtcaagagatggaattttaggctttctctgccaccttttacctttgtaactagggttgatgtgtgaaccctttgggcagattaatcattagttgcctctttaaaccaatcttttatttatttatctttatttatttatttttgagacaaggtctcactctgtcacccaggctggagtgggtgcagtggcgctatttcggctcagtgcaacctctacctcttgggttcaagtgattctcatgcctcagcctcccaggtagcttggattacaggcgcctgccaccacgcctgtctcattttttaatttgtatttttagtagagacagggttttgctatgttggcaaggctggtctcgaactcctgacctcaaatgatccatctgcctcggcctcccaaagtactggcattacaggtgtcagccaccgcgcctggtctttaaaccaatcctttaaatcttctccattttcaaagtagagtgggaagaaactgatttttctatgaataaagattgtgtaagtcgttctttcaaatgtgatttgtgttcacattcagaaatttgttagtgacatattttcacttatttgcaagtgcctttccttacagtttttctgccactcaactcagatgagttattctcaaggataaagaccacttagatgaatatattttcaaattcttactctgaatgtgtttaagtaaccaccctctaccccgtttggcaaaatgtttcccatttttctgtggtttttattttattttttgtggctttcagaaccagatcacttcttggaaggcatattagaagtttgcagttgagacgataaaataagtcactttttcctgggaggtggtattatgtcacacatcatttggtatcaaaatttcccccggctgtggctgcagagttgaaggacatcagctggctgcgcttggggttggtggtccgttgtgaactctgcaccgtatagtgtgtgtgctttatgtgcaaacgttttaacaaagacaggttgctgcgggcaagaagggttttaacttctgttcgtgttacttctgctgagttggaaggagcacatttcacagatgatgtcattggtggaggccgagcctgccagcaccttgtctgcgtgtgctttggctggacgatggtctacactgggcccctgtgcagcctcctgccggggagcctgtgtcccacctggctctgctctgagccattcatgtcgcctccagtggcagctgtaaaatgaaactcatggcctttgctgtctctcttgtcctgggtggtgaggatcaaatgaacctttattaatggacatgaaaataaccttgtaatttcatacactgaaattacacttttcgtacgcttttcaatgtaacacattgtaaagcgctgtaaaaatatctcaggaaagggctgccaatttttgtcacatctcatgtgacaaaggtaattttttttttttttttggcttggaaagggaacgaaaataagatcatttttcctggtaggaaggtaaaagattttaaagagaaggtttgttacatgtgaaaaaaacgatttgatcaaaggcataattggttgaattatgcattcgacaaggatggaaattacacgttcaacaaagatgtgaagagcgtgcagcctggcaaggcatctctgtccttagcgtgcccacccccaatacgggaagggcaggagaggctggcatgaggcacccgtggtccgtgctgtgggcacctccgggaggcagcctgggacaggcgggtcctgctccagagagagaaggggctgccgtccggcatgtctgggaggctgggtccttccttccccaagggttgtatccacagcccctctcgatcctcacagcagccctgtgaaggagcactgtgccatcctgtgacagggcagccaggtctcattggcactgggtgctgagggtggtgggtgggcgcaggccttgatgcctgactctgaccttgttctccccggcgtggtctgcaccctgtgaagggtgagtgaacgccctcctggcccagttcagccccaggttgtgcctgttgtccccacatcgttaataattatccatagcgtccccttcactcgcagaagcgtccgagcttagacagcaggttccacggccactccaacatgcggtctcaaacccagggcctgcaactcccgccatgtgccccgttctgcttgtcacccgcctcgccctgaggagcctccagctgcttcaggacttgtccctgtgtcacacatccagggcagttgttcactagcatccccgctacccctgaatccatctccacgtgcgtgggcttggacctgcttctctcgcccacttatctgtgtatctctgagtagtgagacttccacgttagcgctgtggggaagaggctgggcttggctcagctgctgagggatcagccgaccccaggtcgctgcggccctttcaggaggacgttggggggcaggagtggccggcggccacctgagaatgggagtggcacccgaatatgtggaatacacagaaattcgagtccgcctgtggccgtctccacggtcctttctaccatgatttctccatgtcccctgcaacagcgacccatcccagccaggagaggagaactctgggaggttgcctggcagttacaagtgtgttaagtattgttgctgcgtgcttatcagttaggctcaggcacagctactaacttccaggcatctcggcagtgtctggcgtttggcagtcaagttgtgtttagttttgacttaaagattaaaaggttatagaatacaggaataatctaccttttgaaggaaaacttgccaagttcgcctgacctttgaaatgccaagaatcccagagatgttgaaggaagtgcccagaggaagatctggtccacagtgggtattcagcacactgatttctttcctataaaaaattatctgtcagggccgggcgcggtggctcatgcctgtaatcgcagcactttgggaggccgaggcgggcggatcacgaggtcgggagatcgagaccatcctggctaacacgatgaaaccccgtctttcctaaaaatacaaaaaaattagctgggcgtggtggcgggcgcctgtagtcccagctactcgggaggctgaggcaggagaatggcgtgaactggggaggcggagcttgcagtgagaggagatcgcgccactgcactccagcctgggcgacagagcaggctgtcaacacatttataaccccagcaatggactgaggtgtgagtaggttccgcgtcgcccttttcctcccagtgttacccccggcactgtgcttgtgtctcggcatcctgtggatggggcctgcggttatccagctggtggttcatgagcacacacatgcctgaggagatggatggagacaggcgttgctagtagcagttcctcctcttgtcacagagtgtgcaaaaacactcttaagtacagcctggtgcgatgggtcaagcctgtaatcccagcactttgggaggccgaggcgggtggatcacctgaggtcaggagttcgagatcagcctggccaatgtggagaaatcctgtctctactacaaatacaaaaattagctgggcatcgtggcgggcacctgtaatcccacctactcgggaggctgaggcaggagaagcgcttgaacccaggaggcagaggttgcagtgagccgagatcgcacctttgctctccagcctgggcaacacagtgagattctgtctcaaaaaaaaaaaaaaaaagaaaccactgtaagtacagacaccgtagcaaccacacggaggccccccgccccgccccccgcgtgttccagtgggaagcagagcctcggaaggcgtgcacacggggggtgcgtgatggtgtctccctctgccctcagatggccaggcctcgggcccgatgtgccagggtgggttcttgtgttccgcgggcttcttgtcccttctgtctgctgtgttgtgcgtgcgtctctctgggtggccttggccgggcttctctctctgtgagacaggcgcatctctcagggctttcttcgttctgctgatatctatcccctctcaggaccactcggtttcaaaagcggtaactaaacttgtctaacacgtgtgcatgagaggaaggcggccagaggcatgggtctgagggctttgcttgaagagcgggcggtgtgcgtgtctcgcagcgcccccacctcggtgtctcagggccttgctgtcttccgcctttttcccagcgtctcaccagcaaagtgagtttatgagaatcatgttaacacacaggcttgatgattgagaaagcagatgctgagaatgtgactatggaatgaataattttcattatgaaaaactgatacattgtttacgacatgattctctgagatgcttgttgctgagattacaaacttaaatggttttattgttatgtaagcacctagcatcttagtgtggagctgaacaggtactgcctgtgtttcagagagctcagccgctgttacagaatactgcaggctgcatggtttacgcaatagaaatttatttcttgtagctcttgaggctggaaatcagatcagggtgtctgcatggtgaggtctggtgaggggccctcctggggggcaggaggctgtgtcctcccagaggcggggagagaactctctctcttcctcctcgtaaccacacaccaatcctgtctgattaggacacagacctcatgatctcatctaatcgtaagtacctcgtaaaggcccaatcttcaggtccaatcacattaggggttagggcttcaatatgagatttttgaggggatcacagttcagcccacagcagtgtcctggtgaccgaggcactatttagatggcgaatattcagacggatcggaaatggcaaagaggacagtcagaaaaacacattacgccttgtctgttgctttatgaaatagatgacagaagcatgttccacgaagtctggaaagacagaacgtaattacttagtgagaatgggttattttttaagttgtggaacaaagttaggtaatttgacccttcttagatgtaacagaccgcagttcccgtggttggttcggatctaaggttctgtgtatttatgtcttctttttgcttttttttttcccactggagaaagctggtaggggagaggtggttggtattaaaacaatgctataacatattgttttggtgtttgcattacaatccaaacacacagcatctggcttattgacaagacagatgttagggtttacatcacaaaacgggattgggcctgtctgctcagtaaactcagaggctgctggatcatgatctggttcttccagtaaatggaattgctttttggagcccatactctgttcacctgcgtgtgtggaggaggacgtcttaccgttgacaaaattggaccgtgctagttggaagttgcacttgaaatgcaggtcagaacaatgggatacgctggtcctgctgtcccaggcgggggagtcacgggagggctcgagtgccacaccacccacacgtcagccaccatgtgggttcccaaggcaagcagtgagttcccaagccagctgtcgtccacctttctgggttagtgtctttttaaataatcaaaggtctttaccatccattaagtactggcccagttgttgtacgcacaactcagaggtgattgtaggttgtgactgctctcagtcggtagttagggtggcctctggcgattgttggaggaattatgggtactttgcgctctctttcactgaaaatgcaaggccaagtggctccagcactcagcagaaaccataactggttttgatgctcttgggagcccaaggccacagtggctgctctgcccccgcgttgtcttatctggaaaggtctgtgggaggcgaggctctgactgcggcgtgcgtctcaggtttgtatctggagcacgtgagagtatgagatgggctgggggtgtccccctccctctgtacttgctcaagtacaggagcagcttgcctgagtctgagatgggctgggggtgtcccccactctctgtacctgctcagggacaggagcagctcacccatttccttcattctttctggctttgttgctcaccattgcctgggaaggaagtggctgcctaaataattaaataatctcctgcttcagagaaaagaggatttcctccaacctattttcagcaaaggattagggacaatgaggtcctgccagtagaatgccatctagattttggtgtggttttccaaggtctcagattgcccacgaagacatggaaatggctttcagacctcagcgggacccctggtgtgggggatgggaggtttgcaggcaaatgggaccacagattctccttcactttccgataaaatgcctcacaaacgtggaataacgggcatctccttttctctctagaaagtgcagtgaggtgacgtgatttcactcagataaatggagacaaaccattaaaatattaggtaaccatcaagtatacacgtgcttttttgttttcagtaataaatgactttggtataaatctgaaagcaacatgtaaaaagaaagctggagcgactgtcatggtggctggagtttccttttgtcctcatttctgatgttatttaactccttttaccatttctcggatgtaatgtggaaacaaaatgtgcaggccctcggcagcgaatgacacgtagagagggaaaccctgggattctcgtaggggagggtgtgtgatgtcctcagcacgcgggggtgctcagcagttgatgttcatcccgcacgcactgagcagctgctgtatgcgctgaagattctgtggggagcaagaggtacaggcgccccagctctcctggagactgggcaaggatggaaggcacatggcatgtagcacacccgctgtgaggaggcgccagggacaaaatgagaagggaagggtgtccgggacggggcatggaggacgggaagccggcagggaccatcagaggacagctccaggcagaggaagccccccaggagggatgagcagaggcctagtctgagacctaagcaggtgtcgactgcccctttagttttcttgctcacaatacagaatgtatgtgttgcttttcaatagtgttttaagcttgtttaatattatacggccaaaggaggaaaatgttacatagtaggtaaatttggatgatttttaacattataaagatgtattgctttattgaacgaatatacaatacattgatttataggtaatttttttattgtggcaaaacatacataaactttaccatcttgtccattgtgaagcgtacagttccatggcgttaaatacactcagtgctgtacgatcatcaccgccaggtacttccagatctttttcatcatcccaaactgaaactgattaggggcaattttaagtagtttctgcatctactattgtgtagcttgctttttgggcaacactcttttttttcatcagtgaaagagatcttaacgggtgaagagaagacattgaaacacaagtgctagttacgtttaaatgcaggatggaccgagataggaggatttttttcttttaaataattggccatagtaaaaggtaaaaaggtaaaaacttgaatgtgaggactcatttgcacttcatattttgcttaatatgctgagagctgcaagagaggaggatctggtgtttcatcttagagcaaatcatacttgatagtaagagacagaaagtcataaaagcgtgatgttcagcaggcaggacatttaaatcatacagctcataatgatgttagttgatggtgttacatggttccatggctttttcctaagtgtgtttataagaaattggaacgaggatgttttctgtggcattttcttccaggagctcggttctgctaattgcttggtttgaataagtgctctctttccagttggtctataacatttcttttactatctaagaaattatgaagaaatagattgattaatttgaaaattacatttaagagtattttcctgtaaaattgttggttctgtgaaaaacaattcctgttatttcttctctaaatacaatgagaattttttttgttcttatattgaaatagctctttgatttcctaaattgctgtgctgctttttaaaggacggcatggtttcagaagctattaggttggtgcaaatgtatttgcggtttttgcattgttgaaatttgctgtttgatattggaatacactcttaaatcaatgtggttatgccacacatcattttaatgtgaatttctcactttatgcttttttgcgactgagttattacttgccgtttaagtttattttagactgtggaaaagacgttagacaaaaagcaaattcgagcgattttcttattcgagttaagaatgggttgtaaagcagtggagacaactcggcaacatcagcaccacattgggcccaggagccgctgggaaccactaaacgagcatacagtgcagtgctgggtcaagaagttttacaggctgggcgtggtggctcacacctgtaatcccagcactttgggaggccgaggcagatggatcacctgaggtcaggcgtttgagaccagcctggccaacatggtgaaaccttgtctctaccaaaaatacataattagccctgtgtggtggcacacgcctgtaatcccacctactcaggaggctgaggcaggagacttgcttgaacccaggagacagaggttgcagtgagctaagatcacaccattgcactccagcctgggcaataagagtgaaattctgtctcaaaaaaaaaaaaaaaaaaagaagaagaagttttgcagaggagacgagggccttgaaggtgaggagcgtagtggccagcctttggaagttgacaacgaccaactgagagcagtcattgaagccgatcctcttaaaactacacgagaagctgctgaagaactcaatgtagccattccacagtcgaccggcatttgacgcaaattaaaaaggtgaaaaagctcggtaagtgggtgcctcatgagctgagcgagaatcaaaaaaattgtgattttgaagtgtcatcttctcttattctacacaacaaaaacaaaccatttctcgatcagattgtaacgtgcgccgaaaagtggatcttatatgacaaccagtgacaaccggctcagtggttggaccgagaagctccaaagcacttcccaaagccaaacttgcaccaaaaaaaggtcctggtcactgtctggtggcctgtgccggtctgatccaccacaactttctgaatctccacaaaaccattacatcttgagaagtatgctcagcaaatccatgagacgctttgaaaactacaacgcctgcagccggcattggtcaacaggaagggcccaattcttctccatgacaaagcccaaccgcacgtcacgcaaccaacacttcaaaagtggaaaaattgggctgcgaagttttgcctcatccgccatattcacctgacctctcaccaaccagctaccacttcaagcatctcgacaacttttacagggaaaacgcttccacaaccagcaggatgcagaaaatgctttccaagagtttgtcgaatcccaaagcctgatttttatgctacaggaataaacaaacttatttctcgttggcaaaaatgtgttgattgtaatggttactattttggttaataaagatgtgtttgagcctagttataatgatttaaaattcacggtccgaaaccgtaattacctttgtaccaacctaagtccccttattattagtaagaaacttaattgtaaaatggagtaattatatattttacatcgttagactcatttaaaaaccgcaagtatagcatgaaattgactagaaaccctatttgtcaggtaatcttcgcagttgacagaaaagtaaaacgtaaaaggagtattaatggcttttccttagcaccctcactcacaattttagttcattaaaaaatgggttgatattgatttctatcaacatgtcacccttgcaaacctcagagcgactgagtctgatggacagtttctcggcttccctggctgtcactcagatgtggcctctcactgtgggccccacgtgggctgcgtgtggccctgtgagttggtcccacccctgcccgacaagcctgtagctttggtcgtcttccaacgagtggctctcccgcctgtgttttgaactcatggagggggagggggagtttgtgcagagaatctaggatcatgtgcatctgattttatgtttttaatgggcctggccaaggaagagagagtgatttggttcctgtcttaacttgaagaccctctggggcaggcacatgttccagggtagactccgggagggatgggtgtgatgtgtctgtagggttccaggcgggaaggggagtgccggaagcaggtctgggagggggaattgggtgtccccagccagcctgtctcaggggcccatgtgggactcttggccagccctctgtgcccctcctggctgtgtcttcaggactaagctctgatttttttttaaatttacccaaattcctttctaaggggtctggggagtcatgccctacaaatcataaattctcatcagatgggttttatttaaccctgtatatcatgacttactttccaatctgactctggcataacaaggaagaaaatcaaaatgttttaccccaaaatatatttccttgtcataccttgaaattgccctgcaaggtcacttgtgggaaaaatccacattctgtagagaatcctcttccccctttgttttccttctttcctttccaggtccaggcaataatcaactaagatccaggcacccttttaagtctgataaaaagcaatttacaacctgccttctctgaagtccgctatctaagagcttcctctgcacaataaaacttggtctccacaatcctttatcttaacctgaacatttcctttctgtcatcccaggtcttcagataaactcaaccaattgtcaaccagaagatgtttaaatttacctatagcctggaagcccctcgctttgagttgtctcgcctttctgaaccaaaccaatgtatttcttaaatgtatttaagtctcatgcctccctaaaatgtataaaaccaagctgcgcccgaccaccttggacacatgttctcaggacatcctgagggttgtgccactcatatttggctcagaataaatctcttcagatattttacagagtttgactcttgttgtcaactgtctgcaaataggagctgcgcccatgagggcatagcccagttaggccgcgctgctccctgctgctgaccagcccctgttggagctgatgctgcccacatcccacagctgagagcaagggtctcaacagcacaggtcctctgcctgcactctgccctggagctgggcatcagccatggtgagggcctggaactgcgtgacacccgggtgtcaggcggccactctcagcatccacattccctcagcatcacggggaggccggctgcagtcgggaatcacgagtgtcatccatgtggtcctccctctttgcagacgtgtgtgtggccgtggtgtttaagttgtgtctgctgccttgggggccctttggaaaggctctttctcacaaagaatgcatcgtgttcgcaaagccagctcatgcctcctaatgtaaactcaaaacccaattcacccctaagcaagtggcccacaccgtgtgtgactggaaaaatcagtgtttcccgacaggatgtgacaaatggggctgtagcagggcagggccgctccccagaaaacaagcgccccaggttttcccttctcctgtaccactgccctggaagagttctacccatgagggcccttggagccatctcgactagaacgttaacaggaaggaaggagcctgcgggagaagacagggctccaggaggcggcggaggcctctgtggtggccaagcaggccccgcagggctgagctgctgggttttcctgggcctgggctgctctctggttccagggaggggttgtaacactcccggcagagctgtctcatggggagggcgttcacaggtggtgagtgtggacagtgaggggaagaccagttccagtctttggcaaatgctgatagtaatgaaaatcattttaaaaatcataacagggcagacaagtcacagctctggttggtcttcacctgccgtcactatcatccctgcagggagagaaggttcggctccctggggctctcccagccccgcgtcatgtgagggggcactagtcacagtgcgggaggcttcagagcggagggcagggcccctgccaaccacccggagccacccacccacccacccaccgctgtttgaagcagggactcggttctcaaagtgccggggtcagaggtcaccagaggctgctgaaatcagggttggagggctggcatgttcgtatttgggggaaggaggcaggatcccaggggacccgtcctgcgtgctgacactttaccacgaggcagctgggccgcgtgcggctcttccgacttttcatcatgcttcctgagccagagccatttaaaaaaaaatgctgaaatttagaaggtagtattcgctctaaaattttgtcgcttaaaaaagtggcttgaagtattcagcaggaaaattgtcccaaattacttgttaaaactaaaagctgggccaggtgtggtgatgcacacctgtggtcccatctacttgagaggccgaggtgggaggatcagatcccctgagcccaggagttcgaagccaacctgggcaacatagcaagaccctgtctctgatacatacgtaaataaaataaaagttaaaactcaaaggggaggaacctgagatccaattttaaatccacctgatgagaaaaaaaaaaaagcagcccagggacgtcaccgtaaacaggcaccgcatccaccaggggtcaggagtcaggtcagggctctggactgggaggggcactgcagggacatcccgtcagcgggcaccgtgcgttgagccaggggtcagggctttggaccgggcaagactctgttttgcttccattttttaagcctctggaagtcctggctgttcagaattccaggcttgaattgctagtgttcccgggactgggaaacagcccggatgtgtggagtaagaggcagctcttggattgctgtgaacgtaggggagcaaggctccacgccctctcccagcctctctgccttctgaatacagcccaggagcctggatgactcactttctggagcacatagataaggagcgggtggaggggagaggccttagttaattaacattcctaggaatctgaggctccttctcccagccctgttgtctgggtagcaacgtgctgaacccagagtgagaacagctggctgcagtgtcaggggcaggaccttttgtcgatgagtttaaaaaacaaagcagaagctgccaggtgcctccttcgcatgttggctcccacgtgttttccccgttctccctccccaccctgagtgacacacgctatgctgcttgaaaatagcacagatgcattttgcttcacggtgaaatgtggccggtagttccccaggagtaaacaatgtggtggtgcccacgggggaagagcagcttaattatgcacccagccccgcatacaaaacgctccctccatggttagaatttgctggggctaagggagtcagggctggttttctccagcagccttggagctaggtggtgtcatttaaatggccctcaaagccctacctggatgtcttcattgtgccacaccagcctttatccaagctcactgggccccacagtgtggctgatagtgagggtctgggggtgggggatcgtgaggtgagggacagcaaccccgtcctgtccttgtctaggcctctgagacaggcccgaaggacaggcttttctctctactgtgggtgatggtcccggctggtcagctagcgtccacagcccctcgactccctgcgcagagcccctctcactggaccggcgtcagtgccccacagagactggaaacctgtttccaaggtgtggctctatggccggaccacagtcggtgaggtgagggccagttccagccagggtgccacctctgccttttcttatgtccactggaaaaaataaagagggtgtttgtcatcccctgtcttttgggactcggggttcagtgcaggccaggggaggttgtgtctctggtgtttgctgaacacaaagcgtatgaaagtggtaacacctcggaggtgagggctttctttttatagcagccatgctggaactcagtgtctgaggagacctagagtatttgtttgaatgtttgaaagagacgtatctggttaatgtgagcagaggcttggaaatttagagcacgctcgactgtatttcagtagacttatgacagcagctacacatccatccattttagcattctcagagtattctaaaacatggagggctgggcacggtggctcacacctggaatcccagcactttgggaggctgaggcaggcggatcacaaggtcaggagtttgagaccggcctggccaacatggtgaaaccccgtctctactaaaaatacaaaaatttgctgggcatggtggtgggcgcctgtaatcccagctactcaggaggctgagacaggagaattgcttgaacctgggaggcggaggttgcagtgagccaagatcatgccattgcactttagcctgggtgacagagcaagactccgtctctaaaaaaaataaataaaaacatggagttcacaaagtggcatgaataatcatgaaacgaagtgacttcaaagtgtaatggttctcatgcatgtaagaattcatgttattaaacaagtataaataaaaaaattgtgcactgcataagtgacagatagttttgtagtatttgttaaagtgccatcatagccgcctgtgaaagaggtctcagtaggtgtctgattcttgtttaatgccacagcttctgagactccatttgtttcaggcagagtggacatttcactcgcggtttaatttgcgggaagatcacattctggccgtttaatcttctgatgacagacagctaactgttgataaggataaaatgaaaccagacatcggtttgcatgtgtccagttgaggggaaaaaggccgaggatgctgtcaggacgcaggcaggcaacctatttaggatggggagtagcagttcagagggtgtagcttccattcctggccccagcctcccttccactcctcccacccctgatcccagcctcccttccattcttcccaccccagatcccacgcctcccttcccacccagcttccattcctggccccagtctcccttccactcccccccacccctgatcccacacctccctttcactcccccgacccctgatcccacgcctcccttccactcccccgacccctggtcccagcctcccttccactccccgcacccctgatcccacaactcccttccactcctcccacccggcttcctttcctggccccacgtctactggaattccactcctcccagctgtcttgcacccgctctctttccccttgttttctcttttccttcccaattagcaccgattttccttccccgattagcacctcccgctgccgctccagctgtgttctccatctcctggtctggggtgttccgctgcagccacaggaccccactgtgggaacccacgtctctgcagggaaatgtttacggtgactttcctatgtgtgtggctggctcgtcagggagcggtgtggaggagacctgaaggacagcccttccccttccctttctccctcctcactccccgaaccctgcccagctctgggcctccccagggctgaggagaggtggcgtctccactcctgacctggaggcccgtctggcttctggctccagccccctctgctgccttctttgtgtgtctgtgatggaatacgcgttctgcgtgatgagactgttatggagacgcaagagaatgtgaaggtgaagcttctcgaccttgggctggagcgggtggggtgctgagagcaccgagagccccttgccacctcggcttctggcaggtcagtgaggccactgtggatcaggcttttaagatcatgggaaaacacacataacaaacatgcaacatcttgtctagatttatgtgcacagttcagtgctttagcacgttcaccttgtgtcaccatcaccactgcccccccgcagaacttccgcttcttcccaaactgaaactccgtcccgcttaaattctctcctccttcccccttcccgtagaccctggcagccccattcaactttctgtctctaggtatttgtcagctcaaatgagtgactcacacaggatttgtccttttgtgaccagctcatttcactcagcacaaagtccacaagggtccctgtgttgtagcctgtatgactccgccgttcctttgcatggatataccacgttttgctcacacattcacctgttgaaggacacttgggttgtttcctgcggcagcttttcctgaccgaaagcttctcaaaaggactagccccctcaggtgccccaaactcgattgcagaagactgtgttgtcacctgcctgcttctacagagaggcaccaacctggggtgacatgtgcactcttggctttgtagtgtcctggcccatccccggtacctggccaatcccctacacctggcccacctccccacacctggccgatccccccacacctggcccacctccccacacctggcccacctccccacacctggcccacctccccacacctggcccatcccccacacctggcccatccccgtacctggcccatcccctgcacctggccgatccccacccttcacttggctgaggcccccccccacctgcctgatcctccccacctggctgatcctccctacctggctgatccccccacctggtcacactgcccctcctccccagagggttgcccctctgtatttacagttgattaaaatcttactttctctgggaattctttacagattaatcttcttccaaagacaaccctaacctgtgccttttcagcagttgtgctattttgcaggacgaattcgcacctgtttctgtgttgctctgtgatcattcccaagtggcttgggcttggagccctgttgctcacacctctgggggccggggaaggtgtttgccagagagacagagtgtatggccttgagggcaccttctccttagaaatccgatcccattcctttccccttctcccactaagggctctctgagggatggtagtggctgggtgtggaattgggttttgctttgctttctctccccagcagctctgggcaggctggctctgtgggggcctgggggtggctcctgcctggactttgagaattggagaggcttggagctcattctcagtggagttcccggtggctgctccgtcttctgagcctggtcctctggccttctgcagatgctgggagccacagcaccctgtgatagaccttttgccagagctcccatgagaagcatccaccgtggtggggccaagtccctaggccccaggcattccccatctggtgggaagtgggggctttagcaagtcgcatctctctctgcccctcctggtgagctctgctccgacagctgtgggaacccgtgggaatgcccacctaggtgcgtgtggcctggcgtctccccagattcacttcctagtttttcacttcacgtggcccagacactcagaaggaaccaccaacccagtggtctgtggtggctctgggggcctgtgggggccaccacctctagtctcctggtaggcatcccctccgcctctgggaggacgggagccgggacagagggggcaaggaggcctcctgggactggggcgttccccaccttccactgtgccggtcttcatgcagggccagagcctggctcggggctgggtttgcactgagccaggtcctgactctcacccatgtcttgggcacgtcgatggggccgggccgctggagagggtgtgagagcaggttcctccccaggtctcagccagtgacggggcccatcctggacttgggggctctgcgtgagtggggcagtggcagctcctgcagggcccaggtggggtgtgggtaggtcggggaggctgctggcctcccagcctccctcaatttctgcgttctaaagatggctatgtgcaaaataaaggtgaaatgatggggcagtactggatcaggtggacatccgggagctggaggcccgtgcactttccctgggacgggcagaggcttgtggtgtccacccacagacgcagacccactggcctgcagggcccatagaggctgttgttggccctggtgatgagtgggggacacgagtatgttctgaaatgagggggaggcttctgttgtgaccttgaccaggaagagaaagagaagccaggaggagagcagacacgcttccgccttgaggacggcacttgttcaagtgtaaagaacggaacaatcgggacaaaatttaaaatgcaaatatggtctcatttatttgtaataaaaggctgctggaaagtaggtgcaggagtggcccaggttagcataatactttttctcctaatcacatccaacttgtttttctactcttatttcagaacatgcccccccgccatcccaggagaagcagcagctctctgcctccttgactgagctccattacctccaagctgagagggttgttcaagagggcgtgtgggattcttttgaaaacacatttttagaaagcacccttttaacaactgaacatgatttggttgaaaataaacatccccgggtactcttgtggtacatgtttatgattttgatgcttctggtctgaatgtacaaccttcacattgtacattacaaacactactgtcaagtttatagattttcattttatttgctaattcatttttcagttctctgcactgcttgtaaatcaggcaaacctgataaactgtctaaacatatgatgatactgaattgattaagttatggtcgtaggtgagaaaacagtacatgttgtgtgatgccattccgaaaaagtttcaaacacacatctgtgcattagaaatgattgccacgtggccaggcacggcggctcacgcctgtaaccccagcactttgggagaccgaggtgggtggatcacctgaggtcaggagtttgagaccagcctgaccaacatggtgaaaccccatctctactaaaaatacaaaaattagctgagcgtggtggtgcatgcctgtaatcccagctactcgggagccgagtcaggagaatcacttgaacccaggaggcagaggttgcagtgagccaagattgcaccactgcactgcagcctgagtgacaagagggaaactccatctcaaaaaattaataaataaataaatgattgccaccgccccctgccccccaccccgccaaggcgtgaacaggagttgtctctccccctttgctgtgtgatagtctttttgcttgaatttattttgcttttccgtaaagaacactcattgcttttaccattggataaaaagcataaaaacaatatagatattaaaagcacctggatttttttgacgctttaacaattttaaatttcttttcaggtgacaatgttcaactctgctttttgtttgtgctcatgaaattttatttgttagccagccaaagccaagtgtttccagttaaatttacaactcttctgtctgttccaaacacagcctaagcaagaagacaactgtgccgcctgccgcaagtttcatgtgaaatacccccagagggcagccgcctccgctgggggtcctccctccgaggtgtgtgcggtggggatgggaacccgcagaggcagcacccagctacttgccacttaggttcttctaactgccctcgagagattgtcactgggtcctggatccctgggtttggattagcagtcggaccagggtgggcttgcaggctgcacttttttttttttttttgagactgagtttcattcttgtcacccaggctggagggcaatagcacgatcttggctcactgcaacctccgcctcccaggttcaagggattctcttgcctcagcttcctgagtagctgggattacagttgcacgccaacactcccagctaatttttttttcttttgtatttttagtagagatggggttttaccatgttggccaggctggtctcgaacgtctgacctccggctatccacccgccttgccctcccaaagtgccgggattacaggcgtgagccactgcacctggcctgcttttgaaataggacgtagggattgagggagggttaggatttcaacgatggctttaacagaagaagagaagatgctgaaagtccggcttatttgaactgtgtgtgtgtgactttgaattgcgtcaaatgccatcttggtgaacagttggaggggccctcaggatgccctgtgacgcgcaggtgtgactttgaatcgcgtcaaagaccgtcttggtgaatagtcaggggccctcaggatgccctgtgacgcgcaggcaggaaattatgatggtgtgtttcaggtatgcaaactgcaccagaggcaacacaaaagcaagtcaatataaaaagactcaatgccttgcatgcctttgttatattctcacgtaatcttcaatcttctgttcatgactttgttttgaaacacttttaaaatgtaagattaattaacttgtaggctgtgggaataatcccatttgccgaatcaaaataatgtatccttgattccaactgtcagaagacaaaattacaaaacatttagttatagatctgattggattttaattacaattccttaacggggcagcgtccgttctacataatgagagctcccactgggcaatggcagaacagtcagttttgtaaggtggaagcaaggaaacagaataagaagctgatggtgaacttcaggttacttcaggttacttcaggttacttctttgtagagggtaaagcagaggggactttgtcacttgctgactcaggtcaacagaatctcctatttttgagaaaaaccggtctgttttgggacctgtcacttctttaaagttccattttggtgacgtggcattgagcaggagcaactccattcctgtttggtctggtctgttggggcctagtgctggagctcagtccaaaacaacagtctcccataatttaaaaaaaagtatttccatttcatttctggaaattcagcctaagaaagtcatatcccaagtgcccacaatcatatcagaatgttctttgcagcagtatctgttgtagcaatgaaaacatctcaagtctgtggataagggattgatcaaatacattaatgaccattctgttaatggaaagaccaaagtctgtaaactattttaaagaggtttattctgagcctgtctaagtgactgtgggctggggaaacagagtctgagaaggtgcacctgaggcagtcagatcacagtttgggtttgtatattttagggagacaggactcacaggcaaagccacaaatcggtacatggaaggtatacattggtttagcccagaaaggtgggatttcttgaaacgggtgtcacaggccataggtggagtcggagattcttcagtgtgcgattggttaaagcagtaaagctttgttgaaagcctggagccagtggaagggagtgtttagatgaggaaacccacgcccgacgcgcagggtcagggttacctgtggggtgcgttcaccttcgtctgctgtggccgcgggtcccgtgagcctgggttgaggcaaagaggttgtggagaccggggctttatcacgcagatgaagcctctgggtagagtctgtttgttttttttttaatttttttgagacggagtctcgctctgtcgccaggctggagtacagtggcatgatctcagctcactgcaacctctgcctcctaggttcaagcgattctcctgcctcagcctcctgagtagctgggactacaggtgtgcaccaccacgcccggctaatttttgtattttttgtagagatggggtttcaccgtgttggccaggctggtctcgatctcttaaccttgtgatccacctgccttggcctctcaaagtgctgagattagtcttccgtgatgtctactttgacatcagtacctaaaatccaaatgggaggggccaggcgtgttcaacctcccttatgtcgtggccgagaattcagttttgaagttgcctctggggttcctttggccaagaggggtccattctgttagtgggggccgagctggaatttggctcttgaagtcagaaggtgaaccacaggccacagtccgcagcctccaggagctactgccgccagctgagggccacagttgctgatcgggaaagggtgtatgtaaggccagtcctctgtccggtcagaagtggaagggtctgggttgtaaatcagagttagggtccgattgctcctctcattagggagttggagtgtgtttttttcttgtagccttaggaatttaggaagttgctggaaccctctgccccgcaggtaacttttgtttccttagcgttagggtccatcttagtcaagaaaactgtttgttttggtctcttagatcacaaatgttacgggaaagaagcaggaaggaaggctgaaaagagaaaacgtacctttgctcactaagcactaagaacaaagaggctttgttctcttgcgtgtgcatttggatatgtcgagggaagccgggtactccaggcagggcccagaggtggtgtcaccctggcagcacactgcagcggtcactgctgaagacacagaaacagcttcccgtgttcttggacttgacatcaaagatggaacggggatgtggcctgggaacgaggaacgtggaagccaggagtgaggaagtgggagggtcccacaagacagcagaagggcctggggttagtcccggggtcagttgtgggacgctggtgctccctctcctccacggctgggcttcccggggtcatgaacctgtctcctgcccgcctcttctggcccccagcgaatgacattgcatataactgcttttttagagtgttaagaaaaaggctgtttcccaaattcagattagtatgagcaaaaagaaggagaccacataggagccaggatgtgagggcgaccaggaggttcaccaggccgtcagcaccgcagccgctggaggcgccaagtgcaggccgtggcagacaaggggaggccggcacactgcccaccatgggagctgctgggtcattttaacttaaatatcctggggccacataaccctgcaatctgaaggacgctacagtttgcaaaaaccaaactctgtatcagtgaagggtccaactcacaatatttgaggagatttattctgagccaaatatgagtgaccatggcctgtcacacagtcctcaggaggtcctaagaacaggtgccaaagtggtcggggcacagcttggttttatacattttagggagacatgagacatcaatcattgtacaatggttttgcccagaaatgcaggacagctgtaagtgggccggcggggggtagggggaccggggaggagggtgggcccggggagaggggggcggccaggggagagggtttccaggttataggtagatttaaattttttctaatggacagttggttgaaagacttatcagtagaaaggaatgtctgggttggggtaaagaggttgtggagacagggctttatcagggtagcgagtttcagggagaatgaatagattgtaaatgtttctcagtggacttcaggtctgtgccagcgtttgtgctggtcagcctttcctgaattccaaaaggaaggagggggtgaggaggcatccgagtcccatcagggccggaagcaggttttcaggataactttggagtgcccttggcggagaggagggctccattcagatgggtgagggcccttcaaatttacttttggtttacatacgtaaaatactttagaaagatttattctgagacaatatgagtggccgtggcttggaaaaacacaaacctgagaaccatcgaggaagtggtccaaggtggtggggctggttggatgttacacatttcagggaggcaggagtcataggaaagacgtaaatcaatgagtggaaggtcgacgtggctcagccggaaaggcaggatgacttgaagtaaagtaggcggattcagaaatgctttacttttttctttttaagtattttttttcagagattctttaatttgcagttgattaaaggagtaaggttctatctaaaacttggagtcaacagaaaggaatgtttaagataaggaggccctgtcagagtcagccacagggtcaaagagccctgtttagcaggtctgacgcccgcaggcgggacttaaccctcatctgtaatggcactgggccctgtttataatttggcatcttagtgccacagagtctggttttttttcttcgatcctgtgagcgtgggttgaggtaaagaggttgtggagaccagggctttatcacgcagatgatgtcttattggtgtcttattgccacagagttccccacctccccccgccctcttgtcattcaggctgttgtgcagtggcgcgatctcggctcactgcaccctccgcctgccgggttcaggctattctcctgcttcagcctcttgagtagctgggattacaggcacacaccaccacacctgactaacttttgtacttttagtagagacggggtttcacaatgtcggccaggctggtctcaaactcctaacctcaggtgatccgcctgccttgtcctccccaagtgctgggattacaggcgtgagccaccgtgcctggccagagtgtattctgtttgttttatgatctctgtattgatgttaatgctggtcagttgtgtctaaaccccaaaagggagggggtagaaggaggtatgtgtaacctctgtcatggctgggagctcagtttttaagatttttctggggttcccttgaccaagaagggatccattcagtcggaaggggcttaggattttatttttagtttgcaagttgaatgtctaggcagctgactgaaggttatttgatgaagccaaatgcctggatgctcccaaagtgtgcatatctggtcctctgtctcgcccgaaacccggaggccctcagggcctgtggattcccgggaacgctcgtgtcacacgggctcgggtggcatgtgcggggacataccacttaatgtacatacaagcctgtcgtgtggcgcagttgatctcaacttttaaataaagaagatgagcatcgccccctccatcatccctgcccacacctctcaccagcgcccactgcctgggtgtggaccagcccctatcgtccccatcgcccccttcgcccccttctcccccatcgcccccttcaccccctttgcccctattgcccccttctcccccatcgccctcttcgcccccatcggcaccatcgccccattccgacactgcatgccctgagttcaagtggaccccacaggttatgggctctgtcccccaagacggcctgcttcagacacagctacaagtctcagggaccacctacacttctgagcacctgccataaacgtcagggagggccctgtgactcagggttgacgatttactggaaggactcgcggaactcaggaggtcactgtgctgaagacaaggggcttatgatggtgggagcaatgtgatgggtccactgggagccccctgtccccgtggagctgtcacgtggccctcctccagaaccgtgtatgtgcggcagccaggattcgtgcatccagagtttcatcagagtctcatcactgcttgggggtctcatcacactattggccaagagattgagttcagtctccagtgtctcccttctccccacaggtcagaggtcaggctggggatggaagctgcagccctgtcctggggtgaggccggcccccccccaggaagctgtttggggcccatcttgagtctcctcattagcataaactcaggtgtggtccacaggggctcttggtgagcaacagaaacactcctgccatgtgggaaattccaagggtcctgaagcatgctgggcaccggaacagaggccaggtgtgttcctcattccaccacggagccagggtctgacccaagtgtttctgtttccaaaggtgatctgccttcctctgctccagccacccctgcggccatgcctgtggtcccctgtgtgggctgggctgtggccttggacctggtccccacgtcattttcttctcccttggggtggattgtctgtgggcccggtgtgggaccaacagctgatggccgacgcctcttgccgtaggttgccggccatgcatacctgggggaagacttgaactccatccctctgtcaaccctgttctgagtcacaagagacactgcaaaccccccttgtgggagctgactcaggctcgggctgggctcaaggcagtggggtggggacagacaggtaaacctgtgatcatgatacgatgtggacctcccatggccaaggtgaatcccaaatgctttgggagcagagtgaccaaaagaagacccctggggagcagacgaggtatgggcagaggcatcaccccctccactctctctgctctcagccctcaccagcccactgcccgggcatgcaccagcctccttcgcccccatcgcctggcccctgccacctgggtttctcagccgctgccttcactcacccctccccacaccagtctggagtgataggctgcgtctgcacgcggctggctctgcctaggtgcccaggagtgactggcacaagtgtgtgctctatgtgcttaatgcctctaacgaccaagtgtgggaagcttttctcgtgtgtagtaatgaaatagctcagatgtaagcagaacagatgcaccagccctcccatgccccagccagtgagtgtgtggctacagctgtggctgcaaagtccccatccctggagttccttggacaggagaagcttctatttgtggaggatgactaaggacaacgtccctgagggtggcctgttggttacaggaagctgaggtttggaacagatccctgcgtgcaggtgagaacgatagaaatgggtgaaggaggctgagagagactcaggagcccctccccggcagctgaggtgacgagggtgcccctgaaggacgccctcagagcaaggtgctggggagggggcgggaagcggtggccctggggcctgctcaccgcacctctgtgccaagcaagctttgtgcttttagttttcaccgactctgcttctgtaaacgcagctggtgtctagggagtcacaatcggtccttgaaaagaggaggcttctctgaagggaatagtgtgtgtcaccaggaggtgtatgccggggatggggcacggcgtgcgtgcagggagaggggccagggggcacagtgtgcatgcaaagagaaggcccagggggcactgcatgcgtgcagggagaggagccagggaggaagcacgtgcgtgcagggagaggggccagagggcacagtctgtgtgcagggagaggggctgggggcacagcgtgcatgcaaagagaaggcctggggggcactgcatgcgtgcagggagaggggctgtggggaaacacagtctgcatgcagggagaggggccatggggcaccatctgtgtgcagggagaatggccgggggcagttgataggtgctgggggacaggcctaaaggcagttgtacttccgagagcttttcccggcagattcccagatctgcaggtgaatgaggtgaaggagcccaaaggggccgtctggatggcagctcctgaccttctccatctgtgctgctgccatgtcctctctaatgctccagccgggggtgctgcagatgctgggggacagaaaacagagccaatcaaatgcctggctttgcaaactggaaaaaaaagtccattgcttttgcaatttgaagggctcacaggagcagaaaattagtggtgaagagtgttataaaattattggatacagtgccttaacctgtaaacttgaagctgaaagtgtgccatgagaaaggtacaagcagaataaaaaatgcaccacctaatgctactgtaggtcctctgaataaataattgtaaagacatcttccttgggacatggataatagggaaaaatctcacagaaaactggggacattgcaaattttttttctcatatacagctttacaattcttgcatagcttatgcgaatttcttactataacttggggttgtaggtaatagtaaatctgaacgctgctgctgctgcttctttttttttcttgagacagattgttgctctgtcgcccaggctggagtgcagcagcacaatctgggctcactgcaatctccgcctcccagggtcaagcgattcttctgcctcagtctcccaagtagctgggattacaggcatgtgccaccatgcctggctaattttgtatttttagtagagatggggtttcaccatgttggccaggctggtctcaaactcctgacctcaggtgatctgcccgccttggcctcccaaagtgctgggattagaggcgtgagccactgtgccctactgaacgctgtttctagtgataacttgctgctctatttttagcaagtttactatatttatttactttattcaaccagcaattactgagaatctgctataggcaggttctgggaacacaggaaacaaagcaaacaacagaaataagaattggtcttttcctggtaggaatttaaaatctaatgggagcagcagcagtctctttccaaaaaaaaaaaagataaatgccacaggtgactctagagaacactgcttttgttctttgcacgtgaaggaaccaggctgcctgaggtgtagaggctccacacaccatgcagggcccgcacaggccccatttggcaggcagaggtagtccctgcccgttttcttgagggctggtggctgcctgggaaattcacctgacaccagattgaaatgcagatcggctttcatctgtttctggagctaaactctggcttcgtgcagcctgccacgcagctcggggactccggcgctgggcgaggaactcggctccaggtgcatcttgttaaaggctgagccccatttctcacatgcgttgcggaatcgaattctccgtgtaactcagaactcagagtgaatgagagatcgatacatgtagggttccagcaagggccgtgtctggtgagcaggggaaaaacacccctttttcatagaccagggactggcaacctttttctgaaaagggcagatagtgaatgttgtaggcttatggggccttgaggtctgtgcacctgctcacatctgccattgtagcaggaaaaaggccacagagaaaatggaatgagtgagtgtggctggtgccagttagcttaatttacaaagccagtcactgacctttacccagataactggactggtggacccaacatggaggggccatgagaccatgcggcccacctccctgtgttacctgtatgtaccacgttgtcagtatccacgcgtggatgggccatgagactgcggcccgcctccctgtgttacctgtatgtaccacgttgtcagtgtccacgtgtggaggggccatgagactgtgcggcccggctccctgtgttacctgtatgtaccacgttgtcagtatccacacgtggaggggccgtgagaccgtgcagcccgcttccctgtgttacctgtatgtaccgcgttatcagtatccacgcgtggagggggccgtgagactgtgtggcccgcctccctgtgttacctgtatgtaccgcgttgtcactatccactcgtgggggggccgtgagaccgtgcggcccgcctccctgtgttacctgtatgtaccgctttgtcagtatccacgcgtggaggggccgtgagactgcggcccgcctccctgtgttacctgcatgtaccgccttattagtattcatggacctttaactacaaatattctgtgatcgcttacctctgctgttcctcttctccttgtctatcttgatatagttatggactgattggatttatggaatggatatacaaacagttcaaaattcaaagctaagagaagaatacacagtggctgctgacctctgctagcggcttccctcctgggggtggcccactgcaaactccaccgtggccctggtgcatgtgacaagcaaatgcagtgatcagaggcttgactaaagcaggttttcacgttggcgacatttaggatggttagttttttaacacatttaaagcaaaggctttgttctctgttgagagtccaggaaaggatcctgacgtcttaagaatctgagtgacaaaatcggtgaacctgagtgaaaatttagaattggaagacatttctgttagcgtatcatcccgggtgctcctggacgcaggactctccacacgtctggttggcggtcagctcatttatgattgagcctgaccttatgacaggccacctcgttaacgattggatgttgtttttatcactctttactacgtttgctttcccacccctgctgtttccatgggtttatccgactctgcccactgaggcagcacagtcccctcgccttagcattgcgggcccagagtatctaacgcgtccgagtgcgaacagtgtcagaaggcactgaggcagcgcggttcccacctcggcattgcaggcccagagtatctaacgcgtctgcgtgtgaacagtgtcggaaggcactgaggcagcgcagtccccaccttggcattgcaggcccggagtgtcttactcatccgagtgtgaacaatgttggaaggcactgaggcagcacagtccccccacctcggcattgcggacctggagcatgtaacacgtctgagtgtgaacagcgtcagaaggcactgccgcagcgctcctgctatttttagcgtcctgctatctttagctgatagagtcaggccacggtgaggccagcaggccgctgaatctcacggaggcttcagaagttgtgatgctggcccctcagcttgcgggaactcttcgaggaaaaaaacgcgcaaactgttaatgttgtcagtgattaatctgattgaagcaaacggggaatggttgttacttttaaatggctcctgacaatggtttggccagggcttagatgtaacagtagtacttacttcttcaatagccaaagcttgaacttaggaaaatgggcagcataatttttagttacagatttgggagctggaagggtgcagagtctcatctctgtgtccatgctaagtgcagcttctcatgatggtggaggacgagtttcttcatgggaaataaaagagcccgtgggaacccttcgcagcggcccacatagaccacggaccacatgggagccgtggggctggtgacctggaagggggcatcctgcagtcacatggcaagggcgacctcggaggagtccaatctgccaggacatgggcagccgcagagcttctgtaccggaggcgatgctgttatctttatttgtgtggatctgtgattcatgtggatctgtgaagcctcatggaggccggaggacgggcattgatgagggaaggtgaggctggcaaattcctggcatggaacagtttgttctcaaagagccagctgagcccacagcagttttgtaatctggaacctcgtggctggcgtgtgatgtgatgaactcccctgctgatgcgtgaataactcctgacacatccctgttctctagtaacacggtgctaggcatgggacacacagccgcttcccaggaaactccacagcgtgagcaccgggtgcctgcgcaggtgcgggaggatggggctcccgtgcggagtctgcgcagggcctcctggtgaaattgcgcccttctggacacactgctgggtccatcacatgagcctaccatggcagatcatatatttgtaaatgaaccttaaaaggtgaggtttttaggctttcagatatttggggggaaagggtagaaaactgcccccaggaggcctgaatgaatcaagtcgtgctgcagagcagggaggattttcggaattagatgccgctgtgacggcagcaggtcggtggcagggtgggaggaagtgtgtcttcgggcagcactttctcatgggacaggtgttctttccgtagacagtctatttatttatttattttttgagacggagtcttgctaagttacccaggctggagtgctgtggcgcgatctctgctcatttgaacctctgcctcctgggctcaagtgattctcctgcctcagcctcctgagtagctgggattacaggtgcccacaccacgcccagataatttttgtatttgtagtagagacagggtttcaccatgttggccaggctggtctggaactcctgacctccagtgatccaccctcctcagcctccaaaatgctccagtgatccgcctgccttagcctcccaaagtgctgggattacaggcatgagctactgtgtccggcctcctatacagtctttcttagataaaacaggaagggttagctttattactaaagaaaacagattagctttattactaaagaaaacagaaatgccatctaagcagaaatagaaactaagtatcagaactcccttgatgactgcgccacacacttcattcccactccattcccagccaggagtccacagcccaagtctcattccagccagctgaggttctgtagttgataatcaattgcacggcactcactagttttctgttttatttatgagtaaagttttaagtgtgacgatgtaagtgaaaattcaagagtgggaactggatgtgaatcaactcattgcctatcgatggcccagcaggtactgctgtccccaaggaaggtgcgggaggagacagtaggtgtcacttatgttcatggctgtcccacgaggcctgtcacgtcctatcctatgagatccatcacatcttatcctgtgagacttacaacaacctatgctacgaacatatcacatcctatccttcaaaaaatatcccatcttgccctacaagcctctaggagcaggtgcagaagtgcacgtgaggaagggagcagtggcctgaggggtgcatgggacagtggcagtcccagcagtgtgtggggtaaacctactagatggtggagaaatgggggcgggggggggcaggtggcccatgttccggtgtgggaaggcatagcgtgcgggcactggcctccccaggtgagacagtggcccgcagcggcatcctgtgcatacctgcacctacggtgttgtgcagtgagtaaaaggctccggcatgagttcggtcctgtcgggaagttggttgggagttttagggacgtggcaataactgcgtcccaagcagctcctccattcagggcccgtgacggtctggagtcggaggagccacagaccaccttctggttcctccattgcactcaggtgggcaactttaaacgtttctaagttaaaacaaagtctaacttactgtagaatagaatgaaaacttggcataaaaatgtaagaatatatacaaaaactaaaagaaataatgtgttgtagtgggtgattagaggtcctgggccagtgagtctctctctccccatcctcttctttcctactccctgcttccctctctctccagctgtgtctctctccatctctctctctccagctctgtctctctccagctccatctctctccagctccatctctctccagctgcatctctctgcattttctcttctggcctttgtggttaaacttgagaataaaaataaaagcacttacaaatttattttatgaccatatctgcctctagtttgtttgtttgtttatttattttgagacagagtctcgctttgttgcccaggccggagtggagtggtgcgatctcggctcactgcaacctccccctcccaggttcaagcgattcttacgcctcatcctcccgagtatctgggactgcaggcgcacgccaccatgcctggctagtttttatatttttttgtcgagatggggtttcgccatgttggccaggctggtcttgaactcccgacctcaggtgattcacctgcctcggcctcccaaggtgctgtgattacaggtgtgagtcactgcacctggcctctgcctctagtttaattagtgcttatgttttatttaggtggcaggtgttgaattacagttttgattaaaacccttctattttagagttggagcaatagacacaggtttacaagttatttatataaagatttctgtacatgtttttgttctaaaaatacatttcattgttaaattgggcattagaagcacaatgatacatttcttaaagaactaattatacaggcaaacactattaatatttaacaaggcatctgtttttctccttgtccatgcgcttccccacaaaagcagagaggggaagctgaatatggcttgggggcacacggcgcggggcacagcatctccactttacttaaagatgagcagtgggtggaggattcaggcgcactgagcatgcagggcactcacaggatcctgctgtgcagatgcaggatccgcagtggggacaggatggataggactgtagagcttgtttgatgcagagattctaggcaggaatgtgaaagcctcaggtgttaagtttcactgtttttactaacactggatattaacaatttaaaacacctttgacatattttcatttgtatttcatgtcttgatggttaagagttgagctgttgagcctagttctattgttgactggctttctgctgaaaagctaacaggttaaatggtttgttaaatccagaaccttcgaggtaggcccacattatcacattaaactcacaagtgtggatcacaagtgaaggagtattgcacagaatgttttttcctttccttataaaatgcattagtctatgcaaatacaactttaggggaaaaataatatatttaaaatatattaagtttatcctatatttatatattttggtttctgttttgtctaagagctccagaaattccttgctgacattgtccaagtcagtggacagccaaatctcatttttctgactcaattctgtgattcttatcttcagagctgcttggattatttagcagtggttctctctttccttttctttccaatcttaaattagcagttctatgtttcactgatcggtcatttgtcaaacaaatactcattgagtttctattaataccattacaccaggcttttgtgttacttagttatcgagaaaatgatttcatccgggttaatgagctaaaatggcacagtagacagtgagccaccaggagagtgagtgctcctgggcttcactaactgtgctgcttccagctgataatgaggttttgtttgagaaactaagccctctggacgtggcctcccagcaggatggacatgcgagctcagctgttcccctgcttggcttttaattggtgctgggatgaggcaggtgcagggggcgggggtgaggggcagggaaagaaccttgaaatacttgagaaaagggcctttcctgcaacttggttaagaaaccgttgcaagcacaataatattgggctgaaagaggttggtcttcatggaattttagtaacccaaagtttaagacaggagtgaaatttcttgtctttatttctaatttgcaaactggaaaagtgagtctgggcagaaattgggtttctagtgcctgtcagtgacctcagccatcaaccgccgaggaactgcaggctgcccggagagtcaaaccctgactgtatcggactcaaaaaataaatatcagtgacaaatgcagacttcgaaaatgtgacccaatgctttcacactcctgtacttttcataaattagtggttttcaaagtggatagcaatatgaatatttctctttttcagtgatactgtttttctcgacaccacaaaactatcctataccctgtacttggctcacctgccctcatagccgcacttgggggggatcactatggtgcctggtggggtggcaggtgcctcctcctgaggcagcaaccccaaaaggtaagcatggttctgcccacgcccccatttccagcaggccttgtcagcggtaggaccatgaataccgactggtgagggggagtgccaggagacagagaagacggctgcccactggggcttctagtctcccttccaggaaggatttgaagtagctgacacaattaaacacaacataaaagaggactttttttaaaaaaagaaaaaagctgagaaaaatgttagcagacgtctgggatggatttagctgtgcattttctggcagtgaaggtaaaaaaggaaatctccatctgggtctaataaaaggcactccatagatacactggggaaaataaactttttcattcaagggagaattaattatagaaggacactgggaaatctaaataccataaacgggttttgctaacgtttcaagaatgttgagattgagtttttttccgttaaataaaaagttgatttctttgagtgccccgaaagccgggcattgcatggcagcccagcgatatagccttccgcgtggctgatggaggctgtttccaattgcctgagctcacacaagggcaggaattacagaacccacagccgtgatttctacgggtttgtcaacagaactccttctcaaagcattttatttgtataaatttataaattccaagtcttaacattacttagtatgaattcagtgaaaaagtaagactttagtgaacacaaaatctgaagcgagaggttgtgatgcttgctggagtcaatctgttcatttccaggttctgttttggttgcattgtgtagaggaaaccttcactcgcgcagataagaagtgctaagtggtcacagggcttagaatcctgcaccgtgcatcctcaaatagctccagaaccttgacagaggcattacagagttgaactcaccagccattgcgtgattcacctaacatcgcttacatttctcagtgtaaagttaagcagcgcaccaaacctttcagcagtcgctaagttgggctcagcactaaggagcacctgacttttccgaggtgcatccataagtcccatggtccgtgtgctcctccatgcctccgtgtgcgcatgctctgctgccgggccacctcccgcacctccgtctgcacatgcccagagcctatgcagagcctccgtatgcgcatgctcagagcaggtgcagggcctcctcccgtgcctttgtgttcgcgtgcccagagcaggtgcagagtccctttgaccttgcttaaggagcgcacaggtgtggaccatggtgccaggatgcgggttgtgagggtagcatggacagagggtgagaactcgagccctgatccaaccacactgtttgaacttgaccctatcacttagcacatgttttaactttggcacgttatctattttttcttagcttcagtttgcttgtctctaaaacggggattatatggcaccttcatgggagttgcatgatgatcaataagaaacccatatagagctgctaaatagtgtctgacacataggaacacacacaaaaaatcagctaactttataggaaaagatgttatcactgtgttttctggggtggcctggagctttcctcctgcggtagcatctcagcaacgaagcgttatcttacatgtgcttcacgttctacaatataagggggcctgagccactgatgctgttcagccaggagcaccaggcaggtgaaagagaagagagctgctgatgagaagtcctgatctttctcctcccagttaaattaaaatgtgtgttgtttccagcatgccagaattatatttataatacaattgagtgtgcaggttttctatattgagtacattttggaaatctgtcccctagtggcatgcatctaatgcactgtccattttaggcagagatgacaacaaacaaatatattactaaacttacattgagactaaaattaaaattaaactagatttaaattaaaaacttttgtgcttcaaaggacgccattatgaaattgaaaagaaaatccacaggacgggagagaggattggcagagcgcaggtctggtcagggatttgtatccagggcagcgttggaaggctgtggagctgtgggaacccatatgtgcctctggtgggagcattcaaaaccatttcagaaaactgtttggcagtttccagtaaatatatgctcctggaaacaacccacatgtctatcaacagtagaaaaaaacaaaaataaatcgtgaaatgttcacattaaataaaatgaacaaacaacatgggtgacttttgacagcctaaacaaggaaaagaagccagacaggaagagtatgttataagattcattgatgtgaggttcaaagctgggcactcctgggggatggaggcagaggtcaaagtggatgagaccttggcaggtgggagggtccacagtcacaacaggggcatctcagatgctggtgatgctgtgtttcttggccctgatgacagtggttacccaggtgaaggctgagccgcacacccagggcaggttaggcactttgtgagcaagttatccttcggtgaaatgttcgttaaaacagatcatgactcatgtggcgttaaatattacagggaaacctccagaagggatgggcttccagggacggtttggcaagggccagctatgctgagctgccgtggtcataaagaccagaaggagaggagggaaggggctgggctgaggaacagcatgggcagaggccccaagacaggactcagcttggctgtgtctgaggagccatcagacagggaggtcaccgagggcctcgtctgccttctccttttatctgagtggatggaaacctcggagggttttgagaagaggacaaaacaagcaggctgtaaggttacatggtcactctggtttgtattgagaataactgcagtgggctcagtggtgagctcaggtggaagcagctccgtgtcttggattgacaaacacaggtttgctgccagtgctacagcggtcagcctggtcctgtgcctccataactggcctctctgctttttcgtggtgcagggaaatgctgcttccggaagcccattcatagtctcctctgtagcctggaattgacccttgaagagttcacaggtcctctccctcagcccttttacttttttctgaacccaagctatggtcagaagcactcaacattcccatatctgttcagcgccggcttcccaaagctctttgcctcgggttgaaatagctccaacttgggctgggcacagtggcttatgcctataatcctagcactttgggaggctgaggcaggcagatcatttgaggtcagaagtttgagaccagcctggccaaacatggtgaaaccccgtctctactaaaaatacaaaaattagccaggtgtgttggtgggtgcctgtaatcccagctactcgggaggctgaggcaggagaattgcttgcacccaggaagcagaggttgcagtgaattgagatcacgccacggcactccaacctggacgacaagagtgaaacaccgtctcaaaaagaaaagaaaagaaatagctccaacttaaagtgttagcgactcagaaaagtatttacccctctgctcgtagagtattgaacgaacctgagattattgccataatttactgcaaataggaaaagcaatgtgagctggggacattttgcttgtttcttctcaccagagcagtgccgcagataagccgactggcttcatgcagcgcagagctcctttaagcattgtgggacaggtggatctgccaagcaggagctttctgtgctggcccaaggcaatgtggctcagttctagcccctctgaccctattctgctgccggtatgcccccacccacctgcctccccgtccccctcctcctcccccaggtcccagccgtcagccgtgttgttttgctcactgtgggatgactgttcccatagaggctgtttctcctgccccgcccctacagagcctcccttctcgtgtcccactgtgagtctaggttggcccatgcagttctggggcctgctgtatgtcttcttcccctagtgaaacagcagattccttggggtaggaagtggcgtctcacctgtctcacctactccatggagcctagcagaggactaagtatactgcagatacttaggacttactttattgagttgactgcagaaaacacagggacaaatcatggtgaccttggattaggcgatcttttcttagatatggtataaaaagcataagcaaccaaagaaaaagatagataaattggactagattaaaattaaagacttttgttcctcaaaggacaccattacgaaagtgaaaagaaaatccacagaatgggagagaagattggcagagagtggctctggtcaggcatttgcatccagaagacacaaagaactctgtcaactcataacaaaatgatgctctaatctaaccgtgggcaaaagattttaattggtgttttaccaaggaggaatacaaagggccagccaatgaatgaaaagatggtcaacattatttgcatttatttacattagagaaatgcaaataaaaactttatgcttcatacccactaagagggctgtaataaaaaagacagacaatgaagaggtgttaaggaggatgtagaggagttggaagtcttgtgcattgctggtttggaatgtaaaatggtgaagctgctcggaaacacttggcaattcctcgaaatacaggaatatgaagagttaccaatatgccctgcaattccacgcctaaatatgtcctcaaagcattgaaaacacgcgtccacacggaaactttcacacagatgttcttgtgttcttggcagcattattcatcatagccaaagagcggaagcatctcagatgcccatcagtagacgaatgggtaaacaatgtgatttatccttacaatggagtagtattcagccacaaaaaggaacgaagtactgatttatgtacaccatgaatgaactttgaaagcatgatgctaagtgaaggaagctagaaataaaaggccacacgttgtatgattctatttatgtgacatgtccagaactggcaaatttgtagggacagaaagtagattaatggttggcaggggctgggggagggggcgtgggagcgactgtaggtcttgtgccttcttgggatgatgaaaatgctctagaattagatggtggtgacgattgtgcaattctgtaaatgaactaaaaaaccactgaattgtacattgtaaagggtgaattttatagcatgtgaattctctctctctctctctctctctatatatatatatatatatatagatatctatatgtatatatatttttttgagacggagtctcgctctgttgcccaggctggagtggaatggtgctatctcggctcattgcaacctcatcccaggttcaagtgattctcctgcctcagcctcctgagtagctgggattactggcgcaccaccacacccggctaattttgtatttttagtagagacagggtttcgccatgttggccaggctggtcttgaactcctgacctcaggtgatccacccacctcagcctcccaaagtgctgggattccaggcatgagctactgtctcggcccaaatctttcttaagttgtgtctggcctttggcagaaatagccacaaagccagggtaggaacgttttactcttcaagtgatgatggcatccgataaccttttagagggaggttttaaaatgcaacgtagcccagggctccagaaaaagacctgcacggagaagagagggctttgtagctctcagcagacaaggcgtgctgcccagggagctcagttttcactgtaactgggttgcactgtcaccaccggtctcctccccacagatcccacgggaggacttcctgttgtgtaacatccagagaagcttctggaagctggggagctctggctgtgcaggaaagatctagctgttttgttgcagaaggcgctcgccatcagggtcccgggtcgttgacccacccacttccgctgctgacgtcatgctgcgctcagcgttattcagggcggaattttcactcgtcagaaatggatttgggagcattttaaaatagtgcgttttcagaatttttgtggttgtctgagaaccaaacaagcaaggcacagcacgggtctgaatcacttacatgggccttgtttgcttgtttaggtcagtgtttctaatactttatatttctaatgtaaagccaaagaaagccacaaagagatttaagatgtgggtggaagtgctctgtttgctgtgtctgtgtttccacagagctttatgtttttttgggaggctggggactggggaggtgagggacatggagctgtagtcgggagggttgggcagccacactgggggtggagaaggtggcccggtccctgcggggctgtggggcaggagctgtagtcgggagggttgggcagccacaccagggatggagaaggtggcctggtccctgcggggctgtggggcagaagctgtagtcgggagggttgggcagccacactggggtggagaaggtggcccggtccctgcggggctgtggggcagatgaactctctgggggcacctgtcatggtggagggcagagaacaatggtccagcaccattaccctggcctgggctgctccaggctgcccgttgcatcagcggtggagggtggaggcactagccaactggggcaggccatagcctcactgtgggctggagactccgtccctgtgctgatctgggacaggtgggctgcagggagactcaggggcccgtgctccttagtcgtttgttcccgccaagccacctctctctctgcccatattcagtggatgccggctgtttttgtttgtggctctctctgcactgttttccatctgcctctgtgcatcagggcctttaatgttttaccgggtattttgagcctcacagtgactgttccgggtccaggggagtaaagagtgctctgctccctgtggaggtgtacttctcttcccccaaagattgctcctcttccccagagcgctcctcttcctccatagactgctccccttccccacggaagagcgctccccttccccacggaagagtggttcccccaccacagaagagtggtccccctccccacagaagagtgctccccttcccccacaggggagtgctccccctccccacagtgcgcttttctcacgtgtcctaagtatgggtggtgcggggtgaacgcattgtccacagggagcagccacccctggaggcaaacaggaacactcattcttgatctagatggtgccaggttgaaaggaggtttttaaaataagtgcaggctcatgtagagatggctgctgcctggcctgatgttgcatgggaaatgcagcatgggaacccttggggggtgggggagacacctcctgtggaagggggtgctgtcctgtcacctcccatgtcgagttgcgcctgagacactagtgtctgtgctgctcagcatgtggtcccacggaggagcccctgcgggcgctggtctctgtgggagactggggtgtgagcacgcggtgtcacaggtcgtgtgtggggggacttatgacaggtgctgtctgatttcgtagtctggatgttcattagcattaatttcaggcactggacgaccaaaagtgagaaaagggaaaacctgagaatttgctcagctgtgtaaaaatgatgccacttacgataattctgcgaagctaccgcttatgccagctacctgtggagcgcaacatcggcttcctgaggcagtctcagcctgctccattttatttcacttagatggtatcccccgtgtgtgacggccggccttcgccctgtgcctccccgcagtgtggctggatctcagggggctcggacacgtgctcagactgaaggtcagaaagagcattttccattctgacccctgacaatggcaagactttccacaggtagacacctgtttttccaatccttactgtgtagcgagactttctgcagatagacacctgtttttccttattgtgtacgtgggcagaggggagaggcactcactcaagaatttcctagatgtctgatacagaactcaccctgtgaatctagttaggtttctaagcatcagtagcacagtgtatgacagcacatgtgccagcagacctcacctgtgcagagggttctatggagaggcgaagtcgttagcctgctgtggcttctctggggaagattcagactggcagacagttgctccagtgccctcatccttgatctgcttactccctgtgatgaacacatgtattttgtgagatgtctgccacatgggtgggaaacgtgtattttcaccatcgtgaaaaaaatatggctgtattcaatagcattgctggaaaatagaatgggctgagggaggtttttaagggtgtggttattgggcagatgttgcaggttcctgctacagtgtgatgatctgtgcagatgttgtaggttcctgctagcactgacggcataggcaggtgttgtatgttcctgcaggttcctgctagcactgatggcataggcaggtgttgtaggttcctgctacagtgtgtgataacctgtgcagatgttgtaggttcctgctagcgttgacggcataggcaggtgttgtaggttcctgctacagtgtgatgacctgtgtagatgctgtaggttcctgctagcactgacggcataggcaggtgttgtaggttcctgctagagtgtgataacctgtgcgatgttgcaggttcctgctagcactgacagcataggcaggtgttgtaggttcctgctagagttgacggcttaggcagatgtaggttcctttgagctcaggaatgtaacacagtaagcttaaggtaacctatacagcttcaggaaaagaggattggttgtttatttcctgtggtctcagggtgtccttccctggagtttagtataggcccatccaccatccagaggcttcattttgaatttggggagtttgctaagaactttaaccaggtctgaaggaaaaaggggagttgtgcatttgtaaagtatttggttttgattgaaccaacagtgcaagttacaggttaagccagttttcaggttagaatatttcctgctggtatggacgtggtcattttagtcatcatactatgacggctgagctgcgtgtccagctgcggtgagtgggccacttgcctctttcacgtaaggaaggcttcctcttcacgcatttgtcagtggtcaagaaagttaaaacaagaaggcaggagaatgtcgctgtcctcccagcacccggtttgggacggtctgggagggtgtgatggagtgcagtgttctgtatgttgatgtgtgttgacggatttctctgtcctcccggcacccggcttgggacggtctgggagggtgtgatggagtatggtgttctgtatattgatgtgtgttgatggatttttctttcctcccggcacccggcttcggatggtctgggagggtgtgatggagtgcagtgttctgtatgttgatgtgtgttgatggatttctctgagtggcgatttcagggatgcttatttctgtccagtgaatctcagacatggggagcctaatcttcacatttggtgactctccctggcagcttctcacgtgaaagctgattgttagctgctggtgcctccctccccggccctctgctcaccacctgccctcacgggtgagccgctgcacttctcgggctcgttggcctgcagtcagctctcggctcggtgctgtggaggtgttttgcttttgccaggaaagtgcatcctccacaccttccctcctggtcgactcttagtcacccggctggtgtgtaaagcacagagtgctctgaacagtgttccaagtgtgtcccaagttaaaacgttgtggttagccaactccagttcaaattccttccctacttcatgtaagatatgtgagctctccagcctcaatttcttcaactgggaaatgaaaataacagggatgtccctttcaaacaatggtgagttttaaatgtgatcatacatctgggagtcttaaaatagtacgtggcacacagtgattcatcagaaaatgtgaggattttactgatggggtaattgggcactggatagctaagacttactagtttcgagataagttagtagcataataataataactattactattatttgagacggagtcttactctgttgctgaggctggagtgcagtggtgccatctcggctcactgcaatctccgcttcctgggttcaagcaattctcctgcctcagcctcccaagtagctgagactacaggcgcccgctaccacgcctggctaatttttgtatttttagtagagacagggtttcaccatgttggccaggctggtcttgaactcctgacctcaggtgattcacccacctgggcctcccaaagtgtggggattacaggcgtgagccaccgccccagcccataatcagaattagaatgtagctatttaaaattttatcccagtgttttaaagtatgtttagagtattagtaccacccaaataaataatcattcattcttttattcagttggtaataatgtgaatgtttagtgagtactaagctcttactgtgtaccctagtatgaagagaataaaaggatgcacaataaatatacatcccctaatcagagacagtttcaaattttagtttataatttgtaggtgttcctcctcacagctatatattagaatcatatgagaatgagtgaggaaagccaaaaaaacaaaaggatcatcgagaagcataaaacaaaaagattaggagcggtgagaggcaggacccaggcttggtattgttatgttttaaataattttctaaagttttgaattgtaaaaaaagcatgcatggaactgaccatcatagccatgttaagtgtacagttcagcagtattgagcacctccacattgtcgtgcagcggaactccagaaattctccgtcttgcaaaactcagcctctgggccgttaaactaggtgtccccacctcccctcccccaggccctggtgaccaccgttctgctttctctgtctgtgattttgaccactttagatacgtcatttcagtggactcatcctgtgtcgttttgtggcggaatcacgttctgttgtgtgtatacaccacgtttttcttgtccgttcacctgtgatggactcttgggcgtctgccgtaggccgctgtgaatgctggcggcggtgatcgtgtgctgacgtctcctccacgtactgagttcgtgtcttttggatgcgcgcccagaggtggcactgctggatcctgtgctgggtcatacctatgtttaattctctgaggaacctccgtgctgtctccatagcagccgtgtcgtttcacacttgcaccaacagtgcacagggctccggttccccacgtcctcaccgggtaactggggttccggctccccacgtcctccccgggtaactggggttccggttccccacgtcctcaccgggtaactggggttccggctccccgcgtcctccccgggtaactggggctctggttccccacgtcctcaccggcacttggcactgtctagtgttttggtagcagccatcctgctccgtgtaggtagtatctcattgtggggttttgttgttgttttttagagacagcacctcgctctcttacccaggctggagtgcagtggcacaaccatacctcactgcagcttcgacctcctgggctcaagcgatcctcccacctcagtctccccagtagctgggatcacaggcgtgcaccaccatgcctggctaattaaaaaaaaaaaaaaaaaaagacaactttttttggagagggagggtctcattaggttgctcaggctggtattgaactcaagtgatcctcctacgttgacctccctaagtgctgggattacagctgtgagctgctgtgcctggcctcattgtggttttaatttgagcacttttcatctccttattagaccttcttgctacaaatgtctattgaggttctttgcctattttaaaatcgggtaattgatttttttctgtcattggcttgcattggcatagtttttttttttttaacttcctaagtggtactgacgtgtggccggggtgaaaacctctggcctaggtatggaacaggtagagggtgttaccgagatgatgagtaggagtgttcagaaggtggtagggatcacccgtctgctccggagggatcgcttgttgagatgagatgaacgctgcacttgtggacatgcagacgtcttgcaaacaagtggggtcaggatgtggtactcaggtgcagcctcagggccagggtggattcgggagcgtaagggaagggactgttgctggaaagaaaagtaggtattgaaggaggtggaggcaaaacagtccctgcacctctccacctgcagactcagctgccgccactgcagcctcccggagcttggcgtccacgggtaaggacctccctcagcttgtgggcaacatgtcttcagccagcgtgccaagaaactgcaaaggcaaaatagtgtttttggcagtgtttcaaagaaacagagagtgcattatgtgcacattcaatagccctactgtagctttttagcaaattacaaaaagtaacacagggcctggtatggtggctcatgcttgtaatccctgcactttgggaggccaaggccggcggatcacttgaggtcaggagttcgagaccggcctggccaacatggggaaaccccatctctactaaaagtacaaaaattagccaggcattgtggtgcacgcctgtaatcccagctactcgggaggctgaggcaggagaattgcttgaacctgggaggcggtggttgcagtgttcagagatcacgccattgcactccattcggacggacagagtgtaagactccatctcaaaaaaaaaacaaaacaaaacgaaggaacacaggattgtatgcagaaagaaagggtaaggcaaaattgaagggatgggatgaatttgagcatccctcattccaaaatcccaaatccaaaatgcccaaaaatctgaaacttttcaagcaccagcatgatgccacaagtggaaaattccattcataagctgttgacacaaactttcatgcataaaattatttaaaatattgtataaaattaccatcaggctgtgtgtatgaggtgtgtgtgaaacacaaatgaattttgtgtttagatttgggtctcatcacaaggtatctcatgatgcatatgcaaatgtcccaaaatccaaagcacatctggtcccaagcattttggataagggctactcaacctgtatttatagacagaagctagaaggcatttgtgggactctcaaactaagatgggtcttcattaccttctaactttggcgatcatgtagtagatatatttattctgagaaacaatcataaatataaatgcatttctttcatttctttttattgagatgggatcttgctctgttgtgcaggctggagagcaatagcatgatctcagcttactgcagcctccgcctcctgggctcaagcaatcctcccatctcagcctccagagtagctgagactgtaggtatgcgctcccacacccagccaatttttgtattctttgtagagacagggttctgctctgtcacccaggctggtctcagactcctggactcatgcgatccattcgccgaggcctccaaaagtgctgggattacaagcgtgagccaccacgcccggcctgaatgcaatttttacattatagtcatttatgcttcttcctgttaatccgaaataagcaattgtgtttttgctagccagctacagagataatgtaaaaaatgttttaaaaccatattatcaagcagaaaatggtgcttgtagatcaatatcttcaacagtttcccattaaaatttcagtatgtggtcggatctaactactggaggagcttcgaggtcatgccagtgtccttaacactcgcgtttgttaaagacagccactgccgccctttgcggctatgtgcctcacctcttccacatcacggagcacacacagaatgttgccatttgagccatgcactgggtcacgggtgggctgggcgtcagggtgcccacagctggagtgacctacagagcccagctctgctggggccccagggcaggtggctgcagcgtccccagcggcctccctggcgtgccacagcatgaggctgtctgctctggtggatgccgtgggccatggatgcgcctccatctccgcacagtgcagccggtctagctccctaagccgccaggctctgtgcccaactcaagcagcagccaagtggagagagctggaatgtgtcatccctggtcccagccttctatttcttaatagaaattaagaacttctgccacgcttaaaagaataagggaaactttcatttcgtagcattctaacttttattttaaaagtctttcactattgaatgactttcctgaattaactacattctcaaaaatattcccagcattggtcaaaggcttaaggaattttttactaaaagttgcaacttgttgagtattaaaagtcttacagataaaaataagcaaaggagatttacagaactcagaaaagaagagaagacacagatatgctttggggaaagtactgaacctagatattaatcagagaaaagctgggaacgttgattcctaggaatgtggatactgtgttaggaagagaaagggaaggagagtctccatcctcccacgtggggacacgtctgctgaaggatgcggggttgaatccccttcagcctctcgtgaatttctgtcttagggaaggagaatctccatcctcccacgtggggacacgcctgctgaaggatgcggggttgaatccccttcagcctctcgtgaatttctgtcttagggaaggagagtctccatcctcccatgtggggacacgcctgctgaaggacgcggggttgaatcccccttcagcctctcgtgaatttctgtcttagggaaggagagtctccatcctcccacgtggggacatgcctgctgaaggaagcggggttgaatcccccttcagcctctcgtgaatttctgtcttagggaaggagagtctccatcctcccacgtggggacacgcctgctgaaggatgcggggttgagtccccttcagcctctcgtgaatttctgtcttagggaaggagagtctccatcctcccacgtggggacacgcctgctgaaggatgcggggttgagtccccttcagcctctcgtgaatttctgtcttagggaaggagagtctccatcctcccacgtggggacacgcctgctgaaggatgcggggttgagtccccttcagcctctcgtgaatttctgtcttagggaaggagagtctccatcctcccacgtggggacacgcctgctgaaggatgcgggtttgaatccccttcagcctctcgtgaatttctgtcttagggaaggagagtctccatcctcccacgtggggacacgcctgctgaaggacgcggggttgaatccctcttcagcctctcgtgaatttctgtcttagggaaggagagtctccatcctcccacgtggggacacgcctgctgaaggatgcgggtttgaatccccttcagcctctcgtgaatttctgtcttagggaaggagagtctccatcctcccacgtggggacacgcctgctgaaggacgcggggttgaatcccccttcagcctctcgtgaatttctcagtctttcagtccactttgctcactagtgtttactgcactaggttttcgtttgggagaataacaaagcctcctttgagttcggggaaggttggaagtggaagctgcctgtttgggagagatgacttctgacctcttctgggtcacgtagcttccccctgcctttttataacaagtagaattgttatgataattaccgtcatcatgatatttttatttatcattatcctctccttcatcaaacatttatagagcaattaattctgtgccattctaacttcatcggtgtaatgtcatcatgaggtacaatagcattattattcccactttagagatgggaattgaggcataacacgtagacggctgcccactgtggaggagctgaaccttggcggtggggccgcagggtctctctgctccctgtgggaccgcccttttctcactgttgtgagcagggctgttcctttccagcaagatgaacaccggtgtaagcgcgtcttcgtgtccttccatggatgtttgtagaggtggagctactgtgtcgaaaggcatgtgtcttggtattgtttgtttactgctaaattgccaccgtacgtttttcttccatgaacagcctgcgaatacaccctgccatttgtttattgggctgttcatttttttctcttgatttgtgagagctctttttatattaaataaattagcccttgccaggtacagtgtggctgatgcctgtaaacccagcactttgggaggctgagttgggtggattgtttgaggccagcaatttgagaccagcctggccaacatggtgaaaccccatctctattaaaaatacaaaaattagccggatgtggtgacgcgcacctgtaatcccagctactagggaggctgaggcatgagaatcacttgaacccggaaggtggaggttgcagtgagccgagatcgcaccagtgcacttcagcctgggcgacagtgaggctccatctcaaaaacaaaacaaaacaaaacaaaaaaaaaaacagacattggccctttgactgatatgcatactgcagataatcccccccccctttttttgagacagggtcttactctgtcacccaggctggagtgcagtgctgtgatcccgcgtcactgcagcctggttccagtgattctcccgcctcagagtgctgggactacaggcatcagccactgtgactggcctcccagtttttcatttgtcttttgacattatggtatacacatacacacatgcgtgtgtgtaaatacacaaatatatatgtcattgcatctttgtaaataacgatgtggctaagtcgttcatcttttcctgagccctggagtgccccatgcttttaagggaccccttccccctttccacaggtataagcctttcaggaattggtctagtattggtcattcatttgttaggaaattaggatgtttcctttcttagggcctctcactgtaaaccctgtgtctgattatgtcataaatggcctgcctcgtttcaaggtgggggacgtctggcagcagagaagtcacaacagtgacggcggctgtgtcaggtggggatgtacatggagaagaaaatggggcaggacagtggggctcggggccgggaggagggcagcctttttctgtgctgcagtcaggaaggcctcctgcgaggacctgtttgagcacaggagtgacatgcagcgccattcccaaagtctcctgggttcccgggggtggagagtgcagctcaggagaatcctcccggcgggcgcccctgtgtggagcgggtacccctgtgcctggtgggcgcccctgtgcggagcgggctgtgagggacgggggctcctctttctgtccccacccccagcctgctgccatcgtcttcagcactgaatacgcgtccgtctgacgggttgtgtatttctatgtgagaaaattaatgaggaattttactgagagttgttctgaccatacaaacttaattgccctttcagtggaatgaaccacacatttctacaacacagaataccgtaatgtagtttaatagcctggaatagcagtaggatgccaagaatttactttccaccgccgataaccacagtgtccttgctggccatcctacaattgctaaagagaatgtagttgtcagtgtagcatcgggactttccaggaaagtcagccaggatgcacccacctgggagtggcttccgcctggcctccagcagctgccgaaggagccgtgtcctttggagttaatggagggactggctgtgtattcaatcacatatgctacatggtctacacatcctgcccacaggtgagttaacaggtcatcttttcatctttcactctaagtcttggggcaggaggtagaagtcagtgacatcaggcccagggtaaatgagtcagtgttcccaatgacatatacggtggcttacagttaccccggcccagacttttttctctctgtccctccgtccctttgtacctgcgtgttatgtggatggcgtgcatgtgtctgcacagctgcgtgatgttcccctgtggactcaacctcccccgcccctggccgccccacatcatggacagctgggctccaatcttctgcttttataaatagtgctgcagatgccttgtgagtacatcagctatatttctgcgaggacagctttgggatcgctttggagaagggagatttctgagaaggggggtacgtttgcggtttgctctgtcagtgccgtaggaggatgcctgttctccacctacctcgccagcagcctgcgctgcccggcttgccagcttctgggcctgcctaccgctgctggatgagatgccacgtcctgttgtggttttatcttgtacttctcctgctaacaggcaggttgagaatctttttatgtgtttaagtccatttgctgttcttttctcttttttgaaaaagaacagcttgtttatatcttttgcccatctttcatttgggttgtgtcttgaggagctctttatatacttctttattcttgatatttttgtgtgcctgattcctgacatatttattattaataataatggagcaataaagtgagtcacataaaaaaaataatggagacagtgattcccaggccaagagacacataaattatttaactgcagtcaaacaggcttatgttagaagcgctttttccaaaatgcaatgtagagttatttaaatttaaaaacatgctgaggaattaaagaaagaagccatctatgttcttcctggggcatcatttgagctcattacgtggacaccgctgcctctgaagctggttctgccacacgcctgacaggccgatcacagcctgaccttgaccaggcagcatccagggcgtcgctgtctcaccgtggtccccagtgttttgggattgaggaggggttcggcttcactctcttcagcgcctggggccttcatcctgagccgcagttggagccacggtccctgctgctgagatgtgagaaaggcctgcgctggggtctgggaaattcgttttctcgcagaaggcagagaaggccgtggaataacagggccgggttctcactggcgggactgttcacctctgcaatctgccccttagtgcctcggctgattcttggtctttggagacctggtccccagtcccacctctgcatatgcctccagataacgctcgccatgtttggggtgtatgagcatgctccttgcgttcactgtcacccaggcatccctcccagcggccctgtgaggcaggtgccaccccacagccctgctctcccgccgaggaaactgagtactgggctaattcacctgccaaagctgcatgcttggaaagtggtgcttagagccaggcaggactcactgcggctcctgtgctccacgctgcccccccgagaggcagaactttctcaggccaccttcagggcctcctggagaggttgagccccagactcctgggaagctgttcccccacgttctgtactccactcacaggtggacccatcgcctccaaagcctgtgggtctcattggctggaatgtctcacactgcagggcacctggccacccaggggcgtgtcacaaatgcgggcggggggcagggctccaccccacaagcctgctcaggaggcctctccacgatccacaatcgaccacctgtccatggagctccgggaatgctggcccggccccactgcagggcttccccagccctcctagacaccctgcacttgcccctcccgagcgcgtgtgcctgacctgctccgcggtgggcgcagagctcctgccgagggctggatggcgcggacctgggcatcgtggcctctgcagtgccagctgtgccctagtagccagggcgccgtcgtcagtccatggctcaggaggaccactgtgggccgatgaaatgcgactgtggacgaggaaattgtactttccgaacattttcacgtgtccccaaacagttacttttcttttgatttttttcaaccatttaaggacgtaaaagcattctcagttcatggaccacacagacaggctgcaggctgcacgtggactgggggcgggtctgtgggcctctgcttcacaggtcagaggtcgctgggttttcgtgtcttctgctttccattgcacagtcccaccctctccttggatcctagaactctgcccagcttggacagtctctctacacccagagaccggttttccgcttcttgtctgcgtcccttgtagcagtcacccacagggcgcttgccagaggacggccccgaactgcctatgggatccctccaggtcctctcagagcctccgtttcttgcatgtaaaattgacacaagaagagcctccctgcaggactgcagccaaggttagccagaaccatttccagtcacggaaccgtcactcagagcagctcccagaaccatttccaatcatggaagcgtcactcagagcggctcctagaaccatttccagtcagggaagcatcaatcagagcggctcccagaaccatttccggtcacggaaccatcactcagagcggctcccagaaccatttccggtcacggaagcggcactcagagcggctcccagaaccatttccggtcacggaagcggcactcagagcggctcccagaaccatttcccgtcacggaagcggcactcagagcggctcccagaaccatttccggtcacggaagcggcactcagagcggctcccagaaccatttcccgtcacggaagcggcactcagagcggctcccagaaccatttccggtcacggaagcggcactcagagcggctcccagaaccatttccggtcacggaaacggcactcagagcggctcccagaaccatttccggtcacggaagcgtcactcagagcagattctagaatcatttccagtcatggaagcattacttagagcagcgtaaatttcttagcaaccctggtgttgacatatgttgattataatgatatccttacaacattaaactacaaagccaaaaccaaaatacaaattaaataaaacttagtctgtgaaacaggttagattccaggcagggtctacgattctggctggctgtgcgaatcgacctctgaccccaaataactaagggtcatgtccatcgttgcggtgccttcaggaaaggggaaagtgtttttcctggcagttctttctctctagaccctgcaggccacctctctcacctgcgtgttgggcttcaggatcagggtccccttccagtccaggagaggcacctgtatctgccttctgcccagagtgtgtgtgcttgttgagtctgaccactcactggggcgctctcttggtaacagggtccctgtcacctagaccttacctcccagggtctagcggatggcggggcaggtgggggacggcacgaaaaacagcagacacgatttcagaccgctggtggcggctgagctcaggtgggcctcacctggagagcctggacggtgtcagaggtgcttcttggctggtggctgaggcttcccagatgcctctttgcctttcttctggggcacggccctctgcaccccagggcagcctgtgtggtgtctgacgatttccacagcagccagagcagcttgtggcagccggggcctgctcccagcgaggggtctgctcccagcacggggcctgctcccagcgcggggtctgctcccagcacgtggtctgctcccagcacggggcctgctcccagcgcggggcctgctcctaacgcatccactacatctagtaatttactagttgaaattgttacatactagttacatcgtttacaaaatgatcatatttgaagaattagctttctgtggatttagtccacattgatgtgagcacctactgtacatgagatagcatgctaagtgctttttatttatttaggcaaaagataaaaagttactgctgctacaatctgtagtgttactggtggagctatgcaagctcgtggatttagggagtccagcctacgagaatggccgcctgtgacagaaagcaggggcgagcgtctgggaatagagctgtgctcatggcagaacaaagacgtgctgtgtttctggcctttgtgttctctccagtggtgaacaaacataggaagctttcatcttcagagtaaacagaaattccaaacccatttcacgcagctttttctagaaggcaatgtgtttaatccacttgttttccgagtctcttagtgtcatcacgacttcctcttatgtcggtgttaattactgtcacaggtatttgcgaaaactacaaggtctattcaggtcaagactagcttctctatttccacattttactttgtgtttccacaactgggctgttttagacctctgcagaggagaactgatttgaatcgggaaaagcaggaggtcccctcacggaggtggacaggacgcccactcctttcccaggctggcctccttgtctcatccctcaagggaagggccaggggcacggaccagcaggccagttgttcagtgttcaggaatctcaggagacattgttaaacattaaattacaaaaacaattaagttgtattaaaaagaaaagtctttaaaaatacctactcaaaacgtctttcttcctgattgtcttgctgagtgtttcgctgcagtctgtgcttccaaggatggcgtcatgtgtgtgcggcagaaaggcgaggttctggcaagagtgagtggctttaggtctgcacgctgtgttaggggagccaggggccagcgtggtggggttcccagagagctgcttctgaacttccagaagcttccagggagtccacgccacatgcacgagtgcgggacacatgctactcaggttccatccaagtctcaacctttgtttttacactaaagacatttttgttgttgtttttgagacagagtcttgctctgttgccaggctggagtgcagtggcacgatctcggctcattgcaacctacacttcccaggttcaagcaattctcctgcctcaacctcccaactagctgggattacaggcacgcaccaccatgcctggctagtttttgtatttttagtagagacagggtttcaccatgttggccaggctggtctcgaactcctgacctcaggtgatccacccacccctgcctcccaaagtgctgggattacaggcttgagccaccacacctggccactaaggacatttgaagtaagaagaatggatcagtaaacacttcacatttctttttttttcttttttttcttttttttttgagacagagtctctctctgtcgcccaggctggagtgcagtggcacaatctcggctcactgcaagctctgcctcctgggttcacgacattctcctgcctcagcctcccgagtagctgggactacaggcgcccgccaccatgcccggctaattttttgtatttttagtagagatggggtttcaccgtgttagccaggatggtctcgatctcctgacctcatgatccgcccatctcggcctcccaaagtgctgggattacaggcgtgagccaccgctcccagcctacatttcttaaatctatcttgctagctcctctcgcacttgaaatcaaatactccagcaactaacacttgtgaagcatttttcaattttcctgcacagttacattatctcagaacggttcattaccgtggggtgtgtgctcttcataaatgcaaactgatgcagaagcagccaccagccaaaaaatcggctttagaacgtacagttttgtagccttcattttttacgttacattttcagttaagatgtgaaaatcattgaaccaattcatttaataaaaagttgagtaacatttatattttgtcacttccgtgggtaaacataacaccaaatacttctcttgtaaaaacagcaacgtgtgcagggtatagaaattcatccattcccctgtcccctcttatccttggtgaggactcagaggtttgctgcagaaacattcgtgcctgcaagcaaaggaaaggattagagcaggaggcggctgggggagctctgggtaactctgggtggatgaggccacatcctgcagccctctggtgaggttcttcctgttgcgtgctggggtttaaacctggatctgtcttgctctgaagcagaggctctcacctgggagcagtcttgttccagccacccgcaacacacttggcagagtccggagacttctgaccgtcatgacggtgggggttgctcccaagaccctgctctgaagacttcctaacctgcgtgctctttcaacaatagcgcgtggacacatttttaacctgagcgatgtaacaaattcagccagctgtgacgatgacttttcagttttacattaacagttcattgaacttatacaccagtaaaacttctgtatcactgtgaagggctcagcaaatgtactttcatttattgatgcagaaattggagattggtactctttatcatctgcttactgtgtaaaggatgtttccaggatgatctagaaggttttcagtgcctgttttgtaaacttttaatttttttaatagaacaattttattttttcctattttgccaagaagacagaatgaagtcaattccgaaatggcaaattcttctgtttataaaatgttataaacattttatcaccagataatcacgttaatttttgtaaacgcccttgggtaggttattcgcacaagttatgcatttttcatgtgagttgcttttcacttaaaaagtgcatgcaacagaaagcaccaccttgtcgaatcgatgtgctgagctaattcctgtcatcattaactggacaggaaccgaaggaagccgtctggcaatatgccttagggtggcagatgcagcttggggcttaaaggaagagaaatagaaagatttgactctgttgaagagcagtgtgtcatccccgagccggattccatttaacatcttataaacaaaacgtgagtcttttcatttctcagtcttccgtgtaagcaatccagaaagtgggaataaaagtaatttctcttgtttttctctaattattcaaaattcatagtagtacagttgaggaaggggcacctcgctgtgagtttcatgcttcccttcgtccaggcgctgctgtgtcctgggtgctgtgtgtatagggcccccgccgagtccagtgtgggtggcagagacgcatccagaagcccccagtaagtttagcattacccatttgggtgaggactatggaagaagagttcctggtgatttcagtaaaaaagatgttttacatgccagatagaaacatgctcaaatgataacaacatgatttgggttgggttattaagttgtttttttaatgttctttttaaaaaagatttgatctcaatgtaaacaaacttgcctaatttttttcagctagttcacacagacattcaatatgcattcatcagctggccctgttccctcttcttgctcagaggctggaagaacttcccatgcaccaggtcatgtttgcgtaaatataattacactgtattatgtaaatatagttaccagcatagttgttaacagttctgccaataaatatttattgctttgatctgaatttgataatcaaactgagatttaaaacacagtggcccgggaagaatcaaaggaaattgtaacgacacattcctcattccttcagtccacaggactttttagatgttgttgggaggtggagtggggatgatgaccccttagccacagtttccctttctgtagtttcagttacttgagataaccgaggtatgaaaatattaacaggaaaattccagaaataaacaattcccaagttttaacttgtgcacccttctggggagcgtggtgaaacctggctccgcctgctccatcgctccagggactgaaccctcccttcgtccagcgtctccaggctgcggacgctccccaccccccttatggcctctcggttatcagatccgtggtccaggggtcgcagtgctcgtgttcaaggaaccctcatttgacttcatcatggccccaaagcacaagagcagtgaggcaggcaatgcgggtacacctaagagaagccagaaggtgctcctttaagtgaaaagtgaaagttctcgacttaataaggaaaaagaaaatggtacgctcagcaatctcaggagatgttgttatgttgccaagatctccagtcagatggaatcttctctctgtgaaactgggaacagcatattgttataattgttctattttattattagttattgttaatctcttactgtgcctaatttataaattaaactttatcaggggtgtgtgttcatagggaaaacattgtgtccataggattcggtactctattggtttcaggaatgccctggggtcttggaagcacccctgaggataaaggggacatcgtgcacataggtttgggtactatctcggattcaggagtcccctggggtcttagaagcacccctgaggataaaggggacatcgtgcacataggtttgggtactatctcggattcaggaatctcctggggtcttggaggtgcccctgaggataagggggttgctgcacccacaccattgcacaccttagtctgtcacttgtcagccggtgtggccccggctggaacactgtggctcattctagctgtgcttttagaaaattcttgagacacacctgttcggccaggttgcatagtgaacctgcagcaggggtggggcctccccagggacattttggccaagctggcatcagctgccccaggcttacaggctgagtgtcacactcacctcctccctactggagtcaactgcctagccctgtgggtgtttgagttcgtgacctcgatggaagatagaaagcagcaggaaagacagtccctgttatcaaggcattgtaacctaaggtcatggagactcgtgcttatgaggtatatgtgggttttaagtgtgtgggaaaccttcacagggcagctaactgcagacctcccaaacccctcctcctcctctgccccagctcagggtgggcttctgggccgggtcctgctggcctcctatcacagcgaggttggaatctgtactgtggagactgtggcatttctgcatcattcctgatgcccgatgctgagattaggaaatcggtctctgaggctgagaggcagtttctcagagtatgagctgggacctgaaaggccgctgttggaaagacagcagcagcctgcaggcctttgtgagaactgtctctatgggcccccgagactgctgtgcgcctgatgcaacaatcacttgttgacaggaggtgtcttcagtcccggccgtggttcggaggagaccacgataaactccttcaggatactgctccatcattttcctcacccgaagataagagccagctacagacgggtgtgttgggtgtgacgcaggctggaaatgtgcagaagtggttcatttttcttccccttaactcccatgtccctgtggtaaaattccattgctgtaaagtcatgagctcgaaacccagttatgctcagctaagttccacggaataatttcattcaagatcataaaacgtaaaacatcacaaacaaaaagtgtctctttacaaatgctcacggtatgacgggcagccctccaggagtggcgtggaggccggggcactcagtcacgtgtgtgccgggagcacaggccttcctcgccgtgcgcggctcctgagctctgagtgaggcagacggtggcagtgacccatccttttctggtaacttcttaggggcaaagaataaaaccattcttcagtttgccccattttatgcctttaatttcaaaaagcatttgacagacgcagaaaagcgcatccctgagcagccctgcgcggtggctgagtgcctgcgtccagggagttgagtataaagatcttcttccttcgtgataatttctatgcctgcatgtcttaccatgcctgattatagcaaatcccaggtacacgttataacaacagctattacgttgtaaaccgaaaacaaaattctaagcccccaaccaacggaatggacctgcatcttggccaaggggaccccaaggaaatgggaaaggcgagttcaggctctgatgggaagaggggctcggacaggcctcatcccaccctcctccctttggaccagcagtgacattaaaacagagacctgagactgacaaaacagactctctgtaccagtaagtttccaacctgactctagtgtaccctcacatgaccgatagcaggccctgagagaaattatcttacctcaaaatacatttcattgacatattttgaaatggcccctcacagctgtctcttgtgggggaaatttgcattctgtagagaatccacttccctttccagctcttttctggagggtctgaacccttttaggctctgctaagagacactcaccatctcttctctctgaagcctgctacctggaggcatcctctacatggaggaaccttggcttccacgacctccttatcttaacttcacgctgacttcaactcttcgtgccgagcttcactctttcaagcagtcgccagtcaggaaatctttgaatccacctgtgacctggaggctcccccaccccctgcttggagatgttgcaccttcccaggccaaaccaacgccaccttccatgtgttggtttatgtctttgcctgtcacttctgtctccctaaaatgtgtcaaatcaagctgtgccccaaccgccttgggcacacgttctcaggacctcctggggccatgtcacaggccatggttttaactttggcaaaataaacccctaaattgattgagagccatttcagatactttttgatataaacgtaagttgtggaaagagatgacatgttttgtttggagtgttaccaggagttgttaggatcttggaaagtcacagcttgcagtagccctgtttggccgtagcccccataaaagcaggagtatctgtgtggggtgatggaaccctgaccctaggcgtcctggcacggtggtgcctctgcattcacggtgacatcgctcctggacacttcgcctctgacacctgcggggccccggcctgttccttataggctcatgcttgagtgtttatcacgacttagcttccttgtgtctgtcacagacagtgcactgtagtggtttgtagaagttcctggtgcaggtagccctgttccttacgatttcatggaatggggacattaggaatatttgtttcctgatggaggggttcctgggtctgtcagggttagaagacctcctgatgatgagcagaacagggcagggagaactctgtctggaaggtccaggcctgggctgggcccccaccctgcctcccatccagacagagtcccaggtggggcctgtgggctgtgactgctgcagggatggcattaaaggagccgaagaggacctggaagcccaggaagctggtgacgtgccccctgcatcaggctgtgcattaagtcaccgcattcaaagggtttgtgtccccttgatgggctcgtctgcctggggctggggctgcagtgggctggaagtgcagagtcctgcgttcacactggatggctactgaggtgaatgggacccaggcacgttttcttatggaatgtccacagcctggttgtttatcccagaagatcagtaatagtgacaccctctgaccatgagccaacctctttccttagctcagggcgctaccagtctgggctggtagaagccccgacacttgcctcactcggatccctggaggaggattatatgggcactggggcaaggcagggacatcttggcagcctccccaccgcacgcttttcttgcaagtcctttgaacggcacctgctccttagctgctgcctggcaactttgagggtttcagtgagatggggtgagtgcttcccagccagcaaagtgcgttgacagtggctggcttgccccccctcccccccgccccggctctggaagcttctccccctgggtcttccagtctcatgtctggacacagacaggagaggtgaggaggagcagcaggggtggcccgggcagttcctgtgacctggaggcctggcaagttgttctgacggccaggcccatccttggggaggcctctgaggacgcctggaaccccaggcccgccctgccttgttttctggtcctggcctgggggggtcgtggtctcgctggtgcagcctcctccgggcaggccccgcctctgctcccttcccctcactccatctgattcggccccgtttccttgtccactccacgttcttctgagcgtgtctctgggacatggttaaggttaagaagcggcctctgaacgagggagaatgtactgaaattgcctaagtgaacttcaaacacaggaagaagcgctcagtcgatgttcatggtgagaacgagggttgatcttttgaatgagtcacgggtttgagagagacctaagaaccattcgatctgaaaactagattcactttgaacaaaatatctcaggtgctaaatactccagttagtgtggggaaatgtctctgagaacgaaagctctgactgaccggagcctgctacagtggatctgaaagatgctcacgaataattctcgctgcagagcttagtaaaccaacaatacaaacgattttctgtaacgacctcccgtaaagcagccactcccctcacagcgctgagcaggcgtaaccgccagggtcctcccccttctgaagccgcggcttccttgcaggccggtgtccggcgttgatcctttaactgaccatgggcagttttagttcacgagtgtggattcttgggatacggtcgggggcggatccccctgtcacgggttgtagaaattgacgcagcgttttccgatgtgcccacctgcttgaggaaggaatagtggtggagacggacttcttattcttcagatgtgcccacctgcttgaggaaggaacggtggtggagacggacttcttattcttccgacgaggcaatctctgcctctccatgcaaggtcgtccaacctgccttattttgttgtttttctgttttcttttgttttaggcttttagcagcctgaagccatggtttttcatttctgtctctagtaataagcagaagagggatgagtaaggggctttactggcccaaccagaaacaaaaagtaagaacccaaaactgtattctctcctttggacacctgtgctggggggagaagcccctcacccagaggctgtcacagggcattcctgggaccctctctttcccagactgtcctccctgcagagctgcgtccagaaggtgcgtcccggctgaatctatactgcagcctcaggtcagtgactggcccggcagtgtcttctggggtcagggtccttgcaggaccaccgtcacatgcttgcatccgtctccctgtaagggaaggggaagggggagggtttccctcattggcttctgcccaccccccaggatgggggcagaagcacctgagggagtctgcctcttccctccatattcactgtgctgaaagctgcagcaggtgcccagttctgcaggaaacaggctttgaacatggattcctgtgaggaggatgtgggggcgttgggggccactgtgggaaggtggggagatgtgggggtgttgggggcccctgtgggaaggtggggagggtgtgggagtgctgggagcccctgtggaaaggtggggagatgtgggggtgttgggggcccctgtgggaaggtggggagggtgtgggagtgctgggagcccccgtggaaaggtggggaggatgtaggggtgttgggggccactgtgggaaggtggggaggatgtgggggcgttgggggcccctgtgggaaggtggggagatgtgggggtgttgggggcccctgtgggaaggtggggagggtgtgggagtgctgggagcccccgtggaaaggtggggaggatgtaggggtatcgggggcccctgtaggaaggtagggaggatgtgggggtgttgggggcccctgtgggaaggtggggagatgtgggggtgttgggggcccctgtgggaaggtggggagatgtgggggtgttgggggcccctgtgggaaggtggggaggatgtgggggcgttgggggcccctgtgggaaggtggggaggatgtgggggcgttgggggcccctgtgggaaggtggggaggatgtgggggcgttgggggcccctgtgggaaggtggggagatgtgggggtgttgggggcccctgtgggaaggtggggagggtgtgggagtgctgggagcccccgtggaaaggtggggaggatgtaggggtatcgggggcccctgtgggaaggtagggaggatgtgggggtgctgttgggagcctggctatttgcctaaccacagaatatctgtgactgtctgatcatctgcacataattggcttttgaaaggggtgtgtgactcttttactctgaagagaggacattcttctgatacccagtctcacaataaaaagttgctacctttactttccccacttggccaatgatatcagtagccacactgcaaactctgaagtctctcagagctctagtctaggactccagagcgtgagtgcgtctgtggtggtgggcttgacctgaggctcatccttgtcacctgctcggtggcagtgcctgcgtgcagacccctcgcagcactcaggtgtggcccgtggacttgtggtttcgctgctggctggggaaccccctccggctcctcacttccccaccaagcgctggtcacagaaacgcccttctctggtcactgctctctggcctggcttggtggtggctttggtggcagccccgtcacccctgggatccgtgtcctcctgtttctttcgtttctcctgaaggttttccaagtgcctgtttgcttctgggaatttcctctctgccttcctccgacttcctcatagccgttcttttattccggcctcccaagattgcgtggagcccggccactgccagggcggccctgtgatgagctacatgggacacaagaggcagccccaggcgcccgcctccacctctaccagcagcgtcttcgctttcacttctgccttctgcggcgtcttcctctgtggagttggcgtcggccactggctgtggggcaacctcagcctctccagcggacgctgcaccatccctatggtggagtctcagctttggggatccagggtgcctgccggatttcagacagcgcattcacagactgtcgccagctgagccgccctggtgtctggagttgttctgtgtatgctgttatccagttactgactcgcagtcctgcagttgtcttcattagatatatattcaatattttggaaatatgcctacaatgcattcgttgtctcggccagtggctcgtgaccctctgcacttggaaggtatataatttccgttgcttaaaaggcgacacgtatactaacatgtttgtttgtgaattgggatatgcttgcttagttttctggctaattcatctttagaaggagggactcagtcgtggggaataaacgcagcgacccctcggtgttcccgctgggctcgtgggtgacgcagtgttttccggtggcttgggaagaatctggaggtcgggtgctgaggcttgagcgtctctcctgtaggttggtttcgcccggtcctcagggcggagttgctgctcattctcatgctgggcctgttttccgattcctggtgctctcttgtcttcacctgcagttcacttgcgggcagtggaggctgcactgtgacgttagtaactgtgaaggtgtgacccatggtggaaagttggttatgtctgtgattgatggggaggtgtttgtggtcgggggtggaactgctatggggggaaggtttgcaagtcgggagacgggagcaatgacagggccccatgggctgccccccggctcctccttccaggctcctacccttccccatgcccggcctcccccacttgcctttctcttcttgagtcagcaccactactcacacccctgagcgtgtgccagggctgagctccaaaccgggcacaggacctcccggccccacggcgtgcctgcagccccgccctcctctctgaggctcagaggcacagcaggtgcagcacagccttggccctgaggctcccagcatggttgtcccggccagtggcttgtgactctctgcccgctgcgtttgggggtgaactgaaggagcccgtgacccgggtccctggcagctgtggcctctttgctgcgcttcctctttggccagagccaaaaccaggttctcttctgcacactggagcagggaccttggcctcaaattctaatgcctgagtttatagttctcccaacttccccagagccggcccatagctcagtcatgtgaacctcgacaccaccctggttttccaggtgagatgagcctcagtgacaggcagaaacacgtggccatgaggaatgcaccagcctgagtctaagggaaagctgccgatttctagcactgatttgcagaggggtgggcgagcctgcccagtgccctgtggtgaagaggagtctctgtcctgagagaggcaccgtgaaggcaccgtgctgaggccagcctcagagccgcggggaagccaggtctgtctgatcgcttcccagcacttcccgtgccatcccacgcggctgtaaatggacacacgttagccacagctgctgcttcacaggcagcctggtcagaaacgtactcctgtcgaaaatggagggtgaatcgcatgaaatcagcgttacgtttgctcctgctgcatttcatgagtccagcggagtctgttccaactgcaccccccaatcctggacgtgctgtgggctccaagcgatgctttggtcaccggctcttttcctctgtgtctcgactcttaggaagctctgtgtttcttcccactgttgtgaactatcagaattaggcattccagagtaggccaagaatgatttggggtgagaatttatatttttatttcagttctggacccagtaaactatggtctaggtccgctggcaccccacatttcccaggtcgactgtgtttccagatcaaagggatgtccctgtgcttttgtggatcattgtgacccaagtgattttgtgcaaaaaatatcttcatggcaggagaatgccactgagagccttgaaaatacctgagatttgtttgaggaagaaaagaaaaaaggaaggagagaaatccagtcgttaccatgagtgtgacgagagtggggagaaccagtggagcttctgatcctgtcccagcagatgccagtggctcggaccaaggaggacagagggatgggcgtgcccacgtgaagcctcaccccagaccccagaccctgcttacatgccgggacgaaggtgggagagaaccgtgcatctcagcacggcggtggaaacgtggtccacctgcggagggcctgtttgcgtttattacacccgagcaaggcccgcacgcccaccagaggggccagggtgcccctgggagccactgagagacgggggaggcacaggctccacgcgccgcttccctggactgctaggaggcggcgatggcgagtcaggaggaagcctatttttagaaacgcttaagtgcccacgatcttctgaccatcaaacaagaaacgttgctgtttgaagctatacacggacggcagaacaagaagtggctgtgtcactggatacctgtacatttgaataccggccattagggagaatcgccctgtaaacattgatccagtgattgaggccggtcggcttgcttctgttctgccccgcggtgtaattcagctaataggttttgtttgtctcagctgaaatgtgaaacttccattaggtgtctaaccctggctaaaagtggttttcagcctatttttaaaaaatctcctttgtccctgcatgcattctaaccccattctaacctgatgcgggcagccacaacccaggccctaacagagttcatggtaaggatggtgaaggcgtgacccacggtggaaagttggttattttgggtaatccagcgattttctgattgaacttcgaatgcggaaacatcttgcccttactggggcaacgaggggaggcaaggcgtgcgccaggcagagacaccttggaatcccacccagcccagatgtgtctcctgggttctgggacgggcgcaggtgactgtatttgcgctggtgggaggagttgcccccttggttaaatccggaggacacagctgcatggtgcttgccctcagccgtttctctcttcttactttgagaataatctcttttttttctagtttctcttttcttaggcatactcctttggaaacttactgggctcacttttacccactatgagaccctatctgtcatgagtagtgcaaggttagagataaccaggtccacatgcacttgtgtctttctgtagtgtgaggcctttgttgacgttatttcagtcacaaaagccgggaactgctggtgcttcccgtcactcgggtagtcccagccgcgggcacacaggctcaagccactcctcacatcagtcaatgttgtaaaccatagtaatagtatacctaatcaatacataaatgttataaacactccacaacaaacaaagtaacatttaatatcaagagaaaaagggagataggaggaaacgttaatgaaccagtccggtggggagtgaagcagacaccgggagccctgggctgggcggggtggtccgtggtcttacgaggaggactcaggtggcagagcctgcggggcagatgccaagttcttatcacaagtgactgcgaggcggcagcggctgaggcagagtcctcccatgagaactgagtgctttttgtgtccttacctggttggatactgtcctattttttttaatttgtttattaagcaaatcaccttatctttgttggcaaagtgccctatgaaatgtaaaacaaagtctttttctaagacggagtttattatgtcaacagtgctctatatactatatataaaaactaaactttaaaaatgttgctgacacgaaaattgagagaagcctacgtttgtgcagaagatgggcaggtagaaggttccagcggtgaggggtgctgacctggagcggctgcggtggggccatgtggctggaagcagggcagtgagcagtgctcagcctgtcgcgagtgtgtaggaagagagctttgttgaaatataacttacatatcataaaatcacccacttaaacaatttgatgagttttattatatttaccaagctacacaacatcaccacaatctaattttaaaacattttcatcaccctcaaatgaaaccccatgcccagtaccaggccctcccaagtgcttgtcatcaccctcaaatgaaaccccgtgcccagtaccaggtgctcccaagccctgtccccagctcccctcccgtcatgccccagcccagccctgggcagctgctaatgcaccttctgttgcccgcagatttgcccgtgtggacgcttctcgtggatggagtcaagcagcctggggctttgtgactggctctgccacttggcggggtcaccccgcatttccctggtgactaagggtgctctgcgtcctctcctgggcttgttggccatttgcaggtctctagagaaattccgccttgtcttttctatttttgagtttgaatcattctgtatatattccaggtacaatctctaattgtttatgattggcatctgatcacggatgctccatgtagggaatggctctgccatgaaagcccaagaaccctgagtgtgtccacgtgggccatacagggaaggcctggtccatggtgatctctgtctgggagggactcaggagcctcccagagccccgagggctgtggcctgtgaggtgctcccttgtgccatggcccatccatctctctccccagagggtgccatgaggctgtttctcatcgcctctgggttctgatgagctgtggcgcctcctgccctgccctgccctgccctgccccaccatcgccaccctcagaacagaatgcaggctgtaaaccgcttagtggtggcctggattggcctgcagcagtttgcgtggtgtcaccctgcccttctgttttcatgtattttaatttatttgctgcttaatctgagcaaaggaaatgccgcctctctctgtatcgaccaaacccaccatggctttctcttcccacgggtgagtcttgctttcccgagctgtacgggtcccaagccgatgccaggcattcagccagtggccaggagtccttccccactctccctgccctctgaaagagcaaatgaagggaatccttgaacctctgggaagctgtagcccttttgtaaatgtgcagccctgtggcggatgggggtcccaggaaaggcccagggctttgtctgcagaaacagctttttcctgtgctcttttgggtaactggtccttcctcaacactgttgatagcagctgtggcgctgggctccatgcagcctgcagcagaacagggtgtttttagtcgtggtgccctctgtgtggcacctgccaacgccccgcgtgtgtgagtggcgatctgcgtctgtgggtgacgcgcatcacggggtgtggagaggtgcacctgtgcgggatttccacgccacctccaccctccaccctccaccctccaccccacctcgtgccttcccagggaagtcctgcctgtgcctctgctgccttgggaagagaaggggtcccggaggaactcacagagcggtggaaggcatcaaagaacctcagctcctcaaacacagtgcccgctgcctccctgcttcccgtccacctcacggggaactaggaattccctcctgtgtctggcggagagagaacctggctaagcattgcggccgaaggttgcagcctcctaggaaatgtccaatacaaaggatagactgcaggctattttgattttactcattttttaacagaacttttatgaaagcagattttacttgggtctggtgccaggatttgtctttacttgtcacatcagctgatgcctcccaggtttcgtaagtcatctgttctaaactggaagccaggtgtcttacatcaaagcttccggtatctccagttgcagaaattagaagagggtggttgaggaccatgtcttcctgggtgacgcccttgagaagatgtcacacctgggccctgtttattatatttggagaaatgggagacgatgatactttagaggaacacagatcccattccagcaactattttaatcagggactctcaggggagggtgagattccaacttacaaattgcaaatgtgcgatgtgctgcacccactcacaaaagacgtgtaccagatcacagttgcggctcatttcaaggtaaagcagccctgaaagacatgcagaaccagagcggttgcaagacccagactgagcagacaggggaggcttcgccttcctgtgtttgcatgcacagcccggactgcatggtgacttacagtgtatttctcatcccaggtcacagtctcagagtgtgagagccctgggtctctgggtcaggtctgaatgaacgctctttcctatgggccttttcctgtcactgccctgtgtatgtcagactggctaagcaacacacatgtctaccggcatcggtgaagagcgtcgttggcgtgcgaggctgtgtgtctgagcagctcctcccaccttcccccgtcacgggagccgcagagttgcaagaccctggggaatggaggctttgttgttcggtgggtcccacttcatcggggtaggcggcaaggccagcgggctgcagcgtgtgcctcggatgtggcgtctgagggacagcgagtgggttgcccgcaggggccttgcttgcactggcttagagagctaacagcgtttggtgggactcagtttatcgttctttccctgctttgaggcaggcccttgatgtgcaggtgaagtgcccgtgggctggccgcgtagcttccaggtgtttcttcttccagtggggttggcagaacacggcgtgaagctctgctgtgaagatgccgaaaacagcgcccctctctgctgaagggctcgttatccgactctgccttagccccgtcctcttccttcctaccacacagcgggaggcatgggatgcacacaggcgggcttccacagtcggggggccgctgacaggaggaacccctcccagcagcttcagggtgcttttggcccagcagcctggggcctccaggacatgcctcctctaaaggggtgttaggtaactgcagttttctcctctcctacttaccgttgccagagtttttaaaaagaaggaggcgaatactttcaaatgacttatataaaaatctatattttaaatttatttctgtaagaaaaaaattggttggtacaaatatagcaaaaatgttaacatttgtgagatctgggtgatttatttccttactccagttttctgcacgtttgaattatttcataatgccccccccgcctgtaagtgggtgtatctggagaggtgtcatccttcctgaagagggacagtggctgagccacttgtgaccagggaagcccagcccacacctccacggccctggcgcagggcgggcgcgacttagttcacgacaacctagtttctgcccccagttccaacttggggtcagccagagaacagcaagtacgcccccgtccccttctccccttgccagccccacaggctgctgcgcctcccgggcgtgagcccacgccgtcaggcccacagctgccctcccagccctcttccccggaccccttcccgcctccctggcccggctggagtccctgggagcccgtggaggcggctgacctgcaggctcggagtccgtggctgctgctgcttgttccagtggctgtcgtttgtttccacggggattcatgttgacatctgttactcgtcctcaagtgagcccgtctgcatgaaggcacaccttggggctgctgagtcagccacatccttgacagttccccacagcccctgtagtgtgtcctgtgtgtgagcaaaagcgcaggccagatcccagaccctccttccatccccggactgggcgcattggagcaaattcctccatgctgcctgctccgtcctctcccttgccctgttcctttccatgctttattaacggggaaatgtggggagggtcagagggccagtgaggccagtgctgcccctcaaaaggcaggtgtctatgctgcgtgacactgaacgctgcctaaaccatctggataattgatcgggtgtgagtttgcacgctgtgctccggcctgcctggcgatggttctgggtttggtgttgcgctctgtcaagtaggaagtgatagtaaattctattttatttatttatttttttgagacagagtctcaatctgtcgtccaggctgaaatgcagtggcactgtcctggctcactgcaacctccacctcccaggttcaagccatcctccttgcctcagccccccaagtagctgggactacaggcatgtgccaccactcctgcctaatttttgtatttttagtagagacgaggtttcgccatattggccaggctggtttcaaactcctgacctcaggtgatccacccaccttggcctcccagagtgctgggattacaggcttgagcccccgcgaccagccgagatgacctgtcgggtgagaggcttcagctcctggcctgagattaatatctgaccaaatgctgtggtgcacactgagagtgtcgcatcgtagatcttctgaaacgcagcgtcttgccccttgagcctctctgcaccgcgggtttggagttcatgctcctgtggcagtggcctcaggggtgtttgctccttagggaaattttcctcgaccactgaacacaggtcctgggcacctgtcagaaagccacactgccaggcaccaccaagctcaggcgctggcacctgtcagaaagccacactgccaggcatgtgcacaaagactgtgtgttttcaggcagcagtggatcaatcccaaatgtcaaaactatctttaaaaaaataactaaggctgggcatggtggctcacgcccgtaatcccagcactttggaatgctgaggcgggcaaatcacctgaggtcaggagtttgagaccagcctggccaacacggtgaaacccagtctctactaaaaatacaaaaattagccaagtgtggtggcatacacctgtaatcccagctacttgggaggctgaggcaggagaatggcttgaacccgggaggcgaaggttgcagtgtgccgagatcacgccattgcactccagcctgggggacaagagcaagacttcgtctcaaaaaatatatataataacataataattaagggaaggagccacagaggctgcccaggtagctgcattgatgcaatttgtggtgacattttctctgaggctgctgtgctgtgcggttacagctgcccctctgcgaagccccctcccgctggaaggtgggtgggaaggctgccggaaggctgccaggatgctgtgcggtgccaggtcctgagcacacatatcaggagaagggatgtgagacttcctcccccgtgggctccatgcagccaggaagccctgccgctccctccccatgcgctccccacacgccgctcaccgtgcctttctcccccaacgccagatgtggaattcctctcggaggtgctcttatggcaccctgcacggagaggcctgggcctggccccgaagaaggcacagcccatgtgcaggcgcctctgtctggaaggcatgctgcgtccattttactgtttccccaaccctgtggcactccttcctgttccttcttctacagtcttccgtgtgaatcgtggaaatgagtcagatgggcatgtttaacatcataccacacataccttttgcaaaaatgtattttttagcggccaggtgagcagctgatgtggtggacagaaagctcaccggaggccccaaggccttgcagcctccacgtgcctctcatcagtgtgtgaggtgcagtaggcggaggtttgctgagcttagcggctctgtgagaggaggtcgtccaggtcagcggctttgaaagccccggcacactccagctcccatgcagttatgctgtgtaagaaatggcaacagggccaaaaccttgtaactctcttcagagttggacgtaaaacactgaggtagctagaaatacattctaagttgaggtaatttggggcatggtggcatgcctgcaatctcagtgctttgggaggctgcacagggagcattgcttgagcccaggagttcaaggctacggtgcactgtaactgtccctgtgaacagccgctggagtgagtagccactggaatgagtagccgctggtttgaggagtagccactggagtgagtagccgctggagtgaggagtagccgctggagtgaggagtagccactggagtgagtagccgctggagtgaggagtagccgctggagtgagtagccgctggagtgaggagtagccactggagtgaggagtagccgctggagtgagtagccgctggagtgaggagtagccgctggagtgagtagccgctggagtgaggagtagccgctggagtgagtagccgctggagtgaggagtagccactggagtgagtagccgctggagtgaggagtagccactggagtgagtagccgctggagtgagtagccgctggagtgaggagtagccgctggagtgagtagccgctggagtgaggagtagccgctggagtgaagagtagccactggagtgagtagccgctggagtgaggagtagccgctggagtgagtagccgctggagtgaggagtagcccctggagtgaggagtagccactggagtgagtagccactggagtgagtagccgctggagtgagtagccgctggagtgaggagtagccactggagtacgagtagccgctggagtgaggagtagccactggagtgagtagccgctggagtgaggagtagccactggagtagccgctggagtgaggagtagccgctggagtgaggagtagccactggggtgagtagccgctggagtgaggagtagccgctggagtgaggagtagccgctggagtgagtagccgctggagtgaggagtagccgctggagtgagtagccgctggagtgaggagtagccactggagtgtgtagccgctggagtgaggagtagccgctgtgcttcagctgggacagggcagcaataccccatctttaaaaaaagtaattaattattgtttaaaagtaaatagttttcacttcctcggagattttcaggaagagctttatatctaagtttctagaatttacacagaagactgaaacagagaagcacttctgacatctaggaatgacttttcctgccaggcgcagtggctcacgcctgtcatcccagcactttgggaggctgaggcgggcggatcacctgaggtcaggagttcgaggctagcctggccaacacaccatttctactaaaaatacaaaattagctggacgtggtggcgcttgcctgtaatcccacctactagggaggctgaggcgggagaattgcttaaacctggaagcggtggttgcagtgagccgagattttgccattgcactccagcctgggtgatgagagcaaaactctgtctcattaaaaagaaaaaaaaaaaagaatgacattttcctctaaggtagtaaagaaaatcacttgagtcattaaagcattaaaccaaaggcaagctgaaaatcagagcaagtttgatggtggtagttgtacagatgagtgatatctcttgatgccaaggtgactgttaggtttctagaatgagaaagtgtggaaataatgatctcgtgtgcaaaccatgcatgcctttcatttggcaaaaatacttacaacatttttactgaggtataattcacatactgtaaaatcctcccttttaaagcatgcaatccgttggttccaactggaaaatattcaaagtcgtgcacccaccaccaccctccaacccagaaggttttcatcccccagtcagaggcggtcggcagccaccaccgccctccaacccagaaggttttcacccccgggcaggggccatcagcagccatttgcccagcccccggcagcccccgtctctgcgttcgccttttctgggcatttcctcagaatggactcacaacatggtgttgcttcacacatgggatgctttctgtccccacgcgtgttgctgtgggtgtcggcgcttccttcctttccgtgtatcccttcatcagtggacgcgcgtttggaggctgccacctttgtcttccatgaacagcgcagccgtgaaccttctcgccgaattttttgtgcccctccaggagtcgctcgagatgtttcctttggtcggtttgtgtcctatggtcagtcacatcagcacagggtagatttttacttcagctggaacttgatgccagccctccaggggacttgccacgtggctttctcgatgcagtttggacaatgggttgttaatgagtcattaggaaacctgttacttgacatagacagtttggtgcctggtttcagctttgctttgctgatggaagcctctggccgtgggtgggttctgctgcgaggagttgcacagggctggctgagctgtgtggctgatcctgtctgggaacgcggagagagagaggctggggtctccatcctcctgccctggagagcttcccgactacccgtgtctttgctctgaatcctgaaaacagccccgtgtgatgtgaccccgtcttttgtttgtttgtttgttcgtttgtttgagacggagcctcggtctgtcatccaggctggagagcagaggcgccatcttgtcactgcaacctccacctccgggttcaagcgattctcctgcctcagcctcccaagtaggtaggactacaggcgcccacatgcccggctaatttttgtattttttttttcagtagagatggagtttcaccttgttagccaggctggtcttgaactcctggcctcaagcgctccgcctgccttcgcctcccaaagtgctgggattacagacatgagccaccatgcccggcagggaccccgttttgtctatgtccccgtttatgcacagtatgtctggccctggattcaagaccggtgaggttcagaagttacacgattgaggctcctgagtttgttttcgttgctaactgtacagagaaccagaatcctagggctgggaggaccacgaaggttgggcctcctaatcccttcatgtcgctgctgacaacatttgacggacgcgtggtgtgaggcagccgcagccacagagccagtgagcagcagggaccgggcgccctgtccccaggctgctgttagtgacggtgtctgcatcctctgggggtccagcgtgttttcggctctgttccttttgggcagtttagtcttcctagaatttgaccatgtgtgggctgctctgtctatggagtagctgttcttttattcatttgctttcttaataaacttgctttcactttgcaaaaaaaaaaaaaaaaaaagaatttgaacatttgtggagaatacaacacaaagagctccctttggtttgaagtgtgaacctgaagagacatgtatgtttccgaccttcctgatgccctgggtgaggccgtctaagtgacctcatggcttcaggtcctttcctgttccaatctggtgtctgttatgctgacgaggccatcaggcaaggccgcgcacttgccaggcaaggcccactgcatgttggcaggcagcctgttttctgaagccatggcacagacaagaatactcattcctacttgtgtcgggttaaacgccgctacactgttgggctgtatctgagttgtttttgatgtaattatttaatgataaacgtctgctcgccggtgttgagactttggagtgggcttcatccattcatcctgatcgttcctccatgagacagggtccctttgttgctggctggaagcggccgggaagcgtgggctcgctgtggcatgggcaatgccacacggctccagggaagcgttcagctttccaaaccagtgtctgggctcgtggccactcctgaaattcagttgccgtctttgaagcttcgaagaaagtttctaggattttcacttttgtattaaaagatatctgtatgcttttctctctttttctggttcacttatattcttattcagtgcaatttcctgatttcacgagaatgagaagcatctatttggctatgttctgtgaaaacaaaggagccagggactttgcttagcctttataggcagcagtttatttatgaagctcttaggatgcttttaaagtccacatccctgtggtttgttggcttcaccacaaaatagagacagcagggaaggcccccgtcaggcagggagacccagtcccggaggaggagggcccgtcctcgtggggaggggcagccaggctgtggcatggtcagggcagtggggctgtgctgcccacctggctttgagtccaggatgacggttactgcatggccagcaggctcgcggggaggccacgacccaaggtcgcgctgaggaaaactgcgtctggctcatttgagggtggagtgttcctccctggcctggtggctgccttgtacgtctgtccccaggagcatggaagcctcggctccccgtggaaacactggttgatagtctcagccaaacatctctgaaaacacagttggggcacatggagactgctgtggtctctttccgttattttacttagacttttctgcaaagctgagtcctaataaaagaaattgcaggtgaattaccgatggaatttattaaagcaaatgtgcagacattcacacagctcctgtccgggacgttctgggtgggacagtgtggaaagacttcctctgagaggttggtaggggagcagaggagctgatgacatcaagtccaaaaacagccccatgaggtttataaacaagagcaccacgcagacagggactccagactgttcagaccctgcctgccttttttggctttaaaaaacgagagttccctgaagcaccgaggggcagcccacacagagaggacttggccctgagcatttacaagtgtctgtgctgggccgggcccctggccttgttctgttcccgttgcctcatttcatgctccaggaccctgagaaagtgctggtgtccccctcatgggtgagaagctcagcgggaaactgtccccgtgcctgcggcgaggagtggcccagcagccaagggtcagcccttcgacggcagtgcccgctcgtccttcccgtcccactgcaccagcattcccctcatggaggaggcttccgtctcctcttcagctgtgtttctcatgccccagaaaggctgatgtcttgcagttcctacagagaactggggcgtgggacgagagccacacgctaaggccccgtattccgaggtgggctcagggccatggccagggctgcgtattcagatgtggcgtttggatttcccgttacgagctaaagtatttttgtggttttagtgctgacatcaaatggcccgcctgagtgttgttgaaatatttcttgtcagagctgtttccttaactcctccaaatacagtgttccgagtaatacagagatggtcaggcccaagtcagctttgcaggagagccttcctgttcctgagcagacacctagcagggttgagcgactcttacccatctgcagatgcagggccggtgaccccacagtggggcaagagcctggagagctcttggctttgcccaggaaggaattcaagggcaagcaggaggcggaagaaacagcttcattgaagaggctacagctccctgactgcccctgcagagcggggctgccctgttaggcggagaggagtagctcagggcagatttaattgcatgcagattaaggggtggtttatgcagaaatttctaggagaaggatgtaacttgtaggcgatcgggtcattgccatggaaaggggccgcagctcctggctgttgccatggcaatggtaaactgatattcacaccgcgggcatgtcttatggaaagctgcctctgccccagccctgttttcaccagtcctcaatctggtccggtgtccaagccccacctctggagtcaagtcccgccttctaccccagtatcatagtttttctttcctcttccattaaagacctttcccaacatcactgtctcttctgttttggaagccttacgatttggccacacgttctgttctttttttttttttttgagacagagtctcgctctgtcccccaggctggagtgcagtggtgctatctcggtcactgcaagctccacctcccgggttcacgccattctcctgcctcagcctcctgagtagctgggactacaggcgcccaccaccacacccggctaattttttgtattttttagtagagacggggtttcaccgtgttagccaggatggtctccatctcctgacctcgtgatccgcccatctcggcctcccaaagtgctgggattacaggcgtgagccgccgcgcccggccgcgttctgttcttatgtacacgccctgagctgtttccactggcagtcagctttgaagttcactgtgtggctctcacaggagcgcagaccctcctggtgctcaccagaagaccttggcccatgagggctgcgtaagacagggtggctcgggcctggggtgctgggccccaggtctccctgcagccctgaacgatgctctcagcagcaggtacaggtctccgttccgacgaacgtgcctcaaggcaacactctgggcaagagcttttgatgcaggttctgaggcagctgcctaacaccgctctcctttccgcagtgtgcaggagaagagaattgggtggacagcaggaccatctacgtgggacacagggagccacctccgggcgcagaggcctacatcccacagagatacccagacaacaggatcgtctcgtccaaggtaacttggcttgggtctgagtgtccataatgtgtctaaaaagcagctgccggggggtgttagtgcttctcggtttcaaagagcggctctgctcctggccctgctgtcacagccaccagccacccccagcaagggcttcggatcaggacctcaccgagggcgctactctctccctctcggtgactgcccacaggaggctttccacctgcccagggctcacagcgcagtgtctccattctcgggtgaccgtgccacagaggcagtgcaggtctgaagtccaggatccaaaccctacccaggtcccacttctgaggcgcctggccacgtgcttgtcgtgggccaccctggccagagtctcagtgccagtaaggtagaaacgataccagccaccccggagaaagagccaacaaacgcaggctggacagcaaaacctggggggaaatctttgagcttgttcacgaggtgcagcccaggtaaagcgtaggaagcacaagcagagtgccgcggtctaaacgaagcgtgtttctctccatggactagagcgtggaagtgcacacacatttcccacgttcagagagtgacctggaaacaggtcttaagaacaaggtggaaatttagctgctgccattaaacatggggtaaactgtgctttccaggtaatgcggaacgcacgtgcctgcgttcagactccatttatcttcaccgtccttcaaaatggatgagctaaacccacgcacacgcgtggacgggctgcacatggggtaaactgtgctttccaggtaatgcggaacgcacgtgcctgcgttcagactccatttatcctcaccgtccttcaaaatggatgagctaaacccacgcacacgcgtggacgggctgcacatggggtaaactgtgctttccaggtaatgcggaacacacgtgcctgcattcatactccatttatcttcaccgtccttcaaaatggatgagctaaacccacgcacacgcgtggacgggctgcacatggggtaaactgtgctttccaggtaatgcggaacgcacgtgcctgcgttcagactccgtttatcttcaccgtccttcaaaatggatgagctaaacccacgcacacgcgtggacgggctgcacatggggtaaactgtgctttccaggtaatgcggaacgcacgtgcctgcgttcagactccgtttatcttcaccgtccttcaaaatggatgagctaaacccaggcacacgcgtggacgggctgcacatggggtaaactgtgctttccaggtaatgcggaacgcacgtgcctgcattcagactccgtttatcttcaccgtccttcaaaatggatgagctaaacccaggcacacgcgtggacgggctgcacatggggtaaactgtgctttccaggtaatgcggaacgcacgtgcctgcattcagactccatttatcttcaccgtccttcaaaatggatgagctaaacccacgcacacgcgtggacgggctgcacatggggatgcctgtggcggcccaccattcacacgtgtgccctcacctgtagacgcatttaatttacattgggtgtcctgccgtgtaaacttctgtggagacctacttaattcacaccaagtgtcctgatgtgtagacccctgcgatagacctacttaattcacaccggtgtcctgacgtgtagacccctgtggagacctacttaattcacaccgggtgtcctgatgcgtagacccctgtggagacctacttaatccacaccgggtgtcctgatgcgtagacccctgtggatacctacttaattcacaccgggtgtcctgatgcgtagacccctgtggagacctacttaattcacaccggtgtcctgacgtgtagacccctgtggagacctacttaattcacaccgggtgtcctgatgcgtagacccctgtggagacctacttaattcacaccaagtgtcctgatgtgtagacccctgtggatacctacttaattcacaccgggtgtcctgatgcgtagactcctgtggatacctacttaattcacaccgggtgtcctgatgtgtagacccctgtggagacctacttaattgacaccgggtgtcctgatgcgtagactcctgtggagacctacttaatccacaccagtgtcctaatgtgtagacccctgtggagacctacttaattcacaccgggtgtcctgatgtgtagacccctgtggatacctacttaattcacaccgggtgtcctgatgcgtagactcctgtggatacctacttaattcacaccgggtgtcctgatgtgtagacccctgtggagacctacttaattgacaccgggtgtcctgatgcgtagacccctgtggagacctacttaattcacaccaagtgtcctgatgtgtagacccctgtggatacctacttaattcacaccgggtgtcctgatgcgtagactcctgtggagacctacttaatccacaccgggtgtcctgatgtgtagacccctgtggagacctacttaattcacaccggtgtcctgacgtgtaaacccctgtggagacctacttaattcacaccggtgtcctaattcacaccggtgtcctgatgtatagacccttgtggagacctacttaattcacaccagtgtcctcatgtgtagacccttgcggagacctacttaattcacactgggtgtcctgatgcgtagactcctgtggagacctacttaattcacaccggatgtcctgatgtgtagacccctgtggagacctacttaattcacaccaagtgtcctgatgtgtagacccctgtggatacctacttaattcacaccgggtgtcctgatgtgtagacccctgtgtagacctacttaatccacaccgggtgtcctgatgtgtagacccctgtggagacctacttaattcacaccaagtgtcctgatgtgtagactcctgtggagacctacttaattcacactgggtgtcctgacgtgtagactcctgtggagacctacttaattcacaccgggtattctgacatgtagacccctgtggagacctacttaattcacactggtgtcctgacgtgtagacccctgtggagacctacttaattcacaccggtgtcctaattcacaccggtgtcctgatgtatagacccttgcggagacctacttaattcacaccggtgtcctcatgtgtagacccttgcggagacctacttaattcacaccgggtgtcctgatgcgtagactcctgtggatacctacttaattcacaccggtgtcctgatgcgtagactcctgtggagacctacttaattcacacctgtgtcctgatgtgtagacccctgcggagacctacttaattcacaccgggtattctgacatgtagactcctgtggagacctatttaattcacaccgggtgtcctgatgtgtagacccctgtggagacctacttaattcgcacctggcatcctgacgtgtagactcctatgtagacctatttaattcacaccgggtgtcctggcgtgtaaacccctgtgtagatctacttaattcacacccagcatcctgacctgtagacccctgtggcgacctacttaattcacacccggcatcctgacgtgtagactcctatgtagacctatttaattcacaccaggagtcctgatatgtagatccctgtggagacctacttaattcacacctggcatcttgacgtgtagactcctatgtagacatacttaattcacattgagcatcctgacatgtagacccctgtgtagacctacttcatttacaccaggtgtcctgatgtgtagacccctgtgtagacctacttaattcacaccgggtgtcctgatgtatagacccttgtggtagacctacttaattcacaccgagtgtcctgatgtgtagactcctgtggagacctacttaattcacaccaggtgtcctgatgtgtagacccctgtggatacctacttaatccacaccgggtgtcctgatgcgtagactcctgtggagacctccttaatccacaccaggtgtcctgatgtgtagacctctgtggagacctacttaattcacaccgagtgtcctgacgtgtagacccctgtggagacctacttaattcacaccggtgttctgacatgtagacccctgtggagacctacttaattcacaccggtatcctgacatatagacccttgcggagacctacttaattcacaccagtgtcctgatgtgtagacccttgcggagacctacttaattcacaccgggtgtcctgatgcgtagactcctgtggatacctacttaattcacaccggtgtcctgacgcgtagacccctgtggagacctacttaattcacaccgggtattctgacatgtagacccctgtggagacctacttaattcacaccgggtattctgacgtgtagacccctgtggagacctacttaattcacaccgggtgtcctgatgtgtagacccctgtggagacctacttaattcacaccgggtgtcctgatgtgtagactcctgtggagacctacttaattcacaccgagtgtcctgacgtgtagtagacccctgtggagacctacttaattcacaccggtgtcctgatgtgtagacccctgtggagacctacttaattcacacctggcatcctgacgtgtggactcctatgtatacctatttaattcacaccgggtgtcctggcgtgtaaacccctgtgtagatctacttaattcacacccagcatcctgacctgtagacccctgtggcgacctacttaattcacacccggcatcctgacgtgtagactcctatgtagacctatttaattcacaccaggagtcctgatatgtagatccctgtggagacctacttaattcacacccggcatcctgatgtgtagactcctatgtagacctatttaattcacaccaggagtcctgatatgtagatccctgtggagacctacttaattcacacccggcatcttgacatgtagactcctatgtagacatacttaattcacattgagcatcctgacgtgtagacccctgtgtagacctacttaattcacaccgggtgtcctgccatgtagacttctgtgtagacctacttaattcacaccgggtgtcctgatgtgtagacccctgtggagacctgcttaattcacaccgggtattctgacatgtagactcctgtggagacctacttaattcacaccgggtgtcctgatgtgtagacccctgtggagacctgcttaattcacaccgggtattctgacatgtagactcctgtggagacctacttaattcacaccgggtgtcctgatgtgtagacccctgcgatagacctccttaatccacaccgggtgtcctgatgtgtagacccctgcgatagacctccttaatccacaccgggtgtcctgatgtgtagactcctgtggagacttacttaattcacactcaagcatcctggcatgtagacccctgtggttcttaattatttatgtgctcttgaagagttgcacatttttaaagaatattttacaacagaaaaggtcaccttttcaaagccttttttatgggattaatttgtaactacaggattgcaaaaaattttaatagctttaacctctagaaacaggatatgtaaatgctgaaaaacaaagtcccaaccagataagtcctgtgggtggtttcccagtcatgattcatggaaggagaaatgtactgatgagaaatcacatccaaaatattgtctctgcagtggtaatacttacaaagtcgacgcagtctcaggcggagctcactgaagatggtttccaagcttatatgtacttcacccatcccccaccctccagcccaaaacaaatcccaaacatactgcttagaactcagcctgcgcagcccagaggtacagagaggcaggaagcacccaggtgtccacatacggtgccattgtggacttgtagggcaggattccaggatatgggtgatgggcgtgtggaaccgcggcgccccctgcacagtgtggctcatttgagccggatgggggccgtgaaggcatcacccagcctgccccctgggagctggcttctcccttcctggggcggagctcgcccgacagccccacatgcctggttctccctgcagatgagggtgctgtgtggggtcacagggaagaaaccagcagcagcggcagagcttgatccaggcattggaggagggtcctggtacccctggcaggggctggcgggaagctgcacttctgtcattgcccatggcggctttggaggagatgacagagcatggcgaattctgcctcccactcctgacccctctgctgtgtcattcaagttttgtccttttcctactgtccgtttcgaacgtcactgcaggcagtggcctcggtggcttcgctccgcctggccctgctccctggctctgtgctaccctctctccccctcggctgggcccttcctctccgctgctccctgtggaactggagcccctcaaggtctcttcagtttctgatccggggagccctgcaggttgtcaggatgggttttgtgggcttattgctgctttccaggacctttgagaagccgtaagtctccttcctaccaggaagccctcactcaggaacgcacagaccggggtcaacaggctctcaggagcgccgtctgcgtgcaggtggagggtgtggcggggccaggagagcacttggccgcctttcatctcaacctctgaggacagaagggggctctcaaatccgcccatgcattgagatcttcgctcttcacagaggtgggattagtagcttagtctcagtttcaagtggatgaggttgtgtaatttcaagggaaaattacatccggcaatacctcttttgctaatggaactcaggaaggaaaggccctcagaaaggctggagtctggaatctaggcaggtagctggcctgacagtaaccttgatccaggtaaaccaaagtggaattctcgagcctggaattgatgactcataattgttttcatttaacagctcaggatgtgtgaaaaaaaaatgctgtttaatttgtaagacctaagtttacgactgattttggagaatacatttgtgataatgtatctatgttttcctggggtggcggaggaaatgatttctacctaaaaaaaagaaatgctagtagttaagactttttaagtgccacagaagcttgttctcagcaagtttgcttttatgaaatcaaaggatgaaagcctttgtcatggaagaagtcgtaatagaggatgaaaatgctgtcgggttatttttaacttctcatctgtttgacggaagtgcagttactggtgataggtgatgatagagtttgtttccttcttgggggagagactttgggcagtgtcaaaacctgaaatgacagcccagcacgccccgttccctgcttcctgtgctgtgcagagctcccccaggcctgcttgcaccccccacgtggggaatcctgaactccacaaagggatggatcactgcatgcctccttttccagatttgtactttggggcacagaattcacatggttcccagctttgcccacaggaggctacagaattaaatgttggcttagactatactgtccctccatgccttcaagaaagttgaatccttctggtaattggggagaaaaaattccctctgcaattcgtaggtatagccagtgttttcatgacttctatttgtataaatgatttccatgtttattatatcatgtaatctctaaaacaaccctgtgagcccaccaatactgattattaccaatgtatccatgaggaagctgaggcttagagctcagtcatgtgcctgaggccacagaagaggatagagcccctgtagtctggcactgggcttggacttccttccgcagagccaggggccctttcttttcatttttgagacagagtctctctctgtgcccaggctggagtgcaatggtgcgatcctggctcactgcaacctccaccgcccgggtttaagtgattctcctgcctcagcctcccaagtagctggaactacaggtgcccaccaccacacctagttaatttttatgtttttagcaaagatggggttttgccattgttggccaggctggtcttgtactcctgacctcaggtgattcacccgcctcggcctcccaaagtgctgggtttacagacgtgagtcgccgcgcccatccaggggcacgtttcttaacagcccctctgggtgctcacgaatttccggcatcagcaatccaccatcctggcataattttctgtgttttgcatccctgcctcccggtcataaacaaaagagtgacctcagttccatgcgagtggctgcttgtcccaagcagatgggtgtccggcgtccccgcctttttcaggactgtcaggtgggccctgtggtgctggagctgtgttcaggtgaacactagttgaggcttcagacagcttgtaggtgctcctgcgggcgcctgggctgctggcaggggacagtgcccgggttcgtctcgcagccagaggccagaggcaggccaggtgaggccatgctcttccctgtctgcacaccacactgctggcaagtaacacaaaacagagactggctaccccaaggggcaggaggcagcggaaacctgaggctcagacactagtgaggcgttccagctcagggccaaaatcagagccagggcagctgtggactctggctatggcgtctgtcgtacaagtgagaaacgaaaagaatgactgtcccgtgtcattcagcaaaacacatggtgtctttggaggtgaagagaggtgccaagcaccactcggttttcccagatttcctgtaggaggaaaaccacttggttctatgctgtggctttcacgccaggagctcctaggattgaggacgtctactgattgtatcacagtcgaagggcccagtgttacattacattgtgtccccaggcaaatacttacatttttacaattcaacaacgatgagcgaaggataactgtccaccattgtcagccttcccactctaacgtgtggaataaaatgctcatttcagttgattgtatcccgatggtactgctgtgtcagtgcagtcacgaccctttaaatgagttccctgggatttcacttttcttgttagacatcaccaggaattaataaccctccttttgacaatagtagtggtcagcagtaataacttactctgtgaaacatagagattacacagcatcatggggcttggctgcagccctcagtgcctgattagaataaagcaattgaggccaggcgcagtggctcacacctgtaatcccagaactttgggaggccgaagcgggcggatcacgaggtcaggagttctagacaagcctggccaacatggtgaaatcctgtctctaccaaaaaataaaaaattaactgcgtgtggtggcgggcgcctgtatttctagctactcgggaggttgaggcaggaaaatcgcttgaacccgggaggcagaggttgcagtgagccgagattgtgccaacgcactccagcctgggtgacagacagagtaagaccctgtctcaagaaaagaaaagaaaaaaagaataaagcaatcatgcaggtggtttcaaattccaaagctgtacagtaacattcaaatatggcaaggccctgccaggtgcggtggctcacgcctgtaattccagcactttgggaggctgaggcaggtggatcacctgaagtcaggagttcaagatcagcctgggcaacatggtgaaatcccgtctctattaaaaatacaaaaattagccgggcatcttggggggttgcctgtaatcccagctactcgggaggctgaggcacgagaatcgcttgaacctgggaggcagaggttgcagtgagccgagatggcgccactgcactccagcctgggcgacagagtgagacttcatctcaaaataaataaataaataagttatggcaagtccatgagtttgcacagccttccaggcctgatggaagtagatctgcatgtttggaaggattgcagatcatattttatctcataaatattaccagaacttcctcgtgtaacatgggaactttcaaaaccatagagaggagcattgtaaatctctgtggctcgtctccactgtcacagttcccagcttgtggccagcctgttgcatctgcaccttcactgtagttccaagggtcctttggaaggaatcctggacagcgtgtacttttcatctgaaagtacttcagtaaatgaaaggtggaattttaagtagactcttttttcattaatgtgactttgttactgagtgatgtattatagaaatttgtggaaacgtataattgtaataaatttgttggcttggatgctggaaagtaagactggcctcacatgggtgagctaaggtatttctttaatgtatccttttaaaagctaatggagagtaactgactttttcattgtggcccatttgagagaaaatatatctttctcaaatatttaaaaaggtcgatcacatgtgtaatgtttgccaagttgtatacacaagaaaactagaactcagaatcattaaataatttgctgaagtttacatggtttttaaatggcagggtcaggatcgaatatggggactgactctgaagtctatgtgtttcatagtatgctaaagagtaaatatttccagaatttcgatagagtacctaaattatcttgaggtggggttagcaaattgtgaattaagattgtggtttttgtaaaggaagaaagtgcctatacttttattggcaatctggtgtttttgtttgctttttttctgaatgagaaacaaaagaaatgaagagctagccatgtgttctctactctgtctcagtttgtatggctacttttccatccagagctcttgccttttggttctcaatttggttgcattcccatgaagaaaacctagtgtggcaggcagaaggatggcctcccacagatgtccacatcctgatccccagaacctctgactatgacactgtctgtggccagggaatcaagattgccaaacagctgacattaaaatagggaggtgattatagaactattcatgtggccaaaagtaaccacagaggcacttgtaagtggaagagggaggcagaacagactgtccgagctacgactggcttcagaggttgaaggggaccaaaggatgtaggcagcctctgcaggaagcaagaaaaggcaagaaaagtttctccctggagcctccaggaaggaaccagccctgctgatactttaattttaacccagtgaatcccattgcaaacttctgacctccagaacagtaaggtaataaatttgcattgttttaagtcacaaagtggaatttgttatagcagcataagaaactcatacacctgtcctaactactttggggatttataatacagactgtacggagattgacgcggtgtcaaaggacccgtgaccttgagacatgcccatagaatcatacacctgccctagccacatcggggatttgtaatacaggctgctcagagactgacgtggtgtgcaaaggacccgtgaccttgagacatgtccatagaaactttccaaactgaagagcaaagaggaaaaaagagtgaagaaacagaacagaactgtggacaactacaataggtgaagcaggccaggcacggtggtcacgcctgtaatcctggcgctttgggaggctaaggtgggcagatcacctgaggtcaggagtttgagacaagactggccaacatggtgaaaccccgtctgtactgaaaatacaaaaaataaaaattttttttaaaaaaattagccaggtgtggtggcaggtgcctgtaatcccagctacttgggaggctgaggcacaagaatcccttgaagctgggaggcagaggttgcagtgagccaagatagcaccactgcactccaccctgggcagccagagtgaaaactccatctcaaaaaaaaaaaaaaaaaaaaaggtaaaccatatatgcataatgaaaaaaacaaaagaagagagaagaaatatctccagtaaaagtggctatttccaaaattaatggcagatgccaaactaccgatccaggaagctcagagataaatacaaaagcagaataaattttttaaaaagggtacacctagacatatcacatttaaattgcagaaaattagactcagaaaaaatcttgaaagaagccacaggaaaagaacattttacctgctgagaaacaagggtaagaattatatcaaactttcttccagaaaccatctaaggaagaaaagaataatgtaaaatatttaaagtgttgaaagaaaaagccagcaacccagaattctgtatctcataaaattatccttcattcgtgaaggagaaataaagactttttcaggcaaacaaaaattgagcgaattcattgccagtagacctcccttgcaagaaatgttaaaagttcttcagaaagaaggaaaattatataggtcagaaattcaggtctacttaggaaagaagaacacagcactaaagtgtgagtttttgtgctgttacaacagaataccacagactgggtaatttatagagaagagacattgatttccccacagttctagagtctgggaagtccaagatcaagacactggcaggtttggtgtctggtgagggccccatctctgcttccaagatggctccttgagcactgcatcctctggagtgggggaaggctgtgtccttatgtggcagaaggcaaaagggcaaaggggcaaactccctctgccgagcccttttatacaggcacctaatcccattcatgagggaggagcccgcatggcggaatcagaactcttgaaggccccgcctcctgggaccgtgactagttgtcacattggcaacacctgaattttggaggggacacattcaaaccatagcaagaaggaataagtgaaggtagtaaaattaaatattttgcttttttgttgttttttatttcttttagagacgtgatctcaccatgttgcccagacgggtttagaacttctgggctcaagggatccactgcctcagcctcctgaagtgctaggattacagggcacagcacccagcttgcttttcgtgttcttaattggtctaacagagagtactttattcagaatgataatagcatttactcagtggtgattgctcaggggtgaatgaaatgtatgacagcagtgccctggggggcaagaaggaactgggcatgctgttgcgaggaatctgcgccacacacacagtgcgggttatgtgagagtgggcgtatattgtggcctctagtgcaaccactaagtaatttttttaaaaaataagtatagttgatattctaagacaggagagaaaatagtcacatcaaatgcttaattaaaacccaagatggcaggaaaagagtataagtcacaaaagaaacaaagactatgaagaaaggaataaaagtcagttacaaatatggtaaatattaatccagctatattaataatcactttaagtgtgaattgtctaaataaaccaaatacagaaactgtcagaatagaaaaaacaagacctaaccatatgttgtgtgcaggaaaggcactttaaatataaaaacacgggtttaagagatagaggaagatgtaccatgctgctactactcaaagggacacaagattagctatattaatttcagacaaagcagacttcagaacaagagaagttaccagggataaagaggggcattgccaaacaacaaagaggtcagttctccaagacaacataacaattctcaaagtctctgtaacaacagagggtcaaaatatgtgaggcaaaaacggatagaactggaaagagaaagaaaatccactgttatatttggacacttcatgacctctgtccacaggcagaaaatcagtaaggacacggttgaactgaacagcaccatcagtcccttggatctaatggacctttatgtctcacgcgtccatgtgaagagagtccaccaataggctttgtgtgagcaacaaggctgtttattcacttggatgcaagtgggctgagtccgagaaaggagtcagcaaagggagatggaggtggggcagttctataggatttgggtatgtagtggaaaattacagttaaaggtggttatcccttgtgggcaggggcgggggtcacaaggtgcagggtggggaggtcatgagactcattgtccaggggggaatgtcacaaggttgattgattagttggggtgaggcaggaacaaatcacaaaggtggaatgtcatcttttgtggttcttcagttgctccaggccatctgggtgtatatgtgcaggtcacaggcttagcttgggctcagaggcctcacaatttataaaatacttcattcaacaatagcagaccacacattcttctcaagttcacatggaacatttgccatgacagatcacattctgggccataaaatacaccttagcaccttttcaaagaatagaaatcataccaagtactctttcagaccacagtagaattaaactagaaataaataaataacaaagttaactggaaaatcccaaaatatttggagattaaacaaaacactactaaataacacatgaaccaaagaagtctcaagaggcataaaaatattttaagctaaacaaaaaatataacttatcaaatcttgtgggatgcaggaaaagcagtgcttagagggaaatttatagtattgactacatagattagaaaagaagaaagatccaaaatctacaagcttcaacattaggaaacttaacaaaaaattaataatcaacattagaacagaaattaatgaaattgaaaacaggaaatcagagaaaattttaaacatcaaaagctggttctttgaaaaaaaaaaatcaataaaatcaataaaactttagccaggctaaacaagaggaaaagaaaagagacacaaattccaaacatcagaaataaaggaggggcatcactactggtaacatggctaataaaaagattaaaaggaatatcatgaacagccctacacccataaacttggtaacttagataacattggccagtttcttgaaaaacgctatctaccaaaactcaaacaaggagaaatataatctgggtgggcctacatcaattaaaagaaatggaatccgtaattaatactcttccaaaacggaaagcacaagactcagatgttttcactggtgaattctaccaaacatttaaggaaaaaaaaaaaaatcaattctctacaatctcttccaggtaatagaagcggaaggaacattttctaattcgttctatgaggccagcattaccctaaaaccaaaaccagaaaaagatattaccagaaagacgatatcacacaccagtatttctcatgaacatagaagcaacgattctcaataaaatattagcaagtccaattcaacaatgtataaaaagaattatacaccatgaccaagtgggtttatcctaggtatgcaaggctgatccaacatttgaaaatcgactaatataacccatatttacaggctaaaaaagaaaacttacatgattatatcaataggtgcagaaaaagaatttgacaaaattcactacccactcatgtactgcagcaaactaaaaacagaggggaatttcctgagcttcataaagagcatctccgaaaagccctacagctgacgtcatacttaatggtgaaaaacgagatggtttcaccctaagattggaaaaaaggcaagaaatcccttatcactgttcttattcagcattgtactggaaatcctagctaatacagtaagagtagaaatgggaataaaaggcctacagctgacgtcatacttaatggtgaaaaacgagatgatttcaccctaagattggaaaaaaggcaagaaatcccttatcactgttcttattcagcattgtactggaaatcctagctaatacagtaagagtagaaatgggaataaaaggcctacagctgacgtcatacttaatggtgaaaaacgagatgatttcaccctaagattggaaaaaaggcaagaaatcccttatcactgttcttatgcagcattgtactggaaatcctagctaatacagtaagagtagaaatgggaataaaagtcctacagattgggaaggaaggaataagactatctttgttcacaagtgatatgattgtccatgcagaaaatcccaaagaaccaacaataacaaaaaaacttctggatgttagaggcgattatagcatggttgcaggatgcaaaaattaatcgctatcctatatgccagcaatgaacagttggaatttgaaattgaaaacaacactatttacatttaacccccccacccaccaaattacacaggtataaatctaacaagatatgtacaaggtctaggtaaggaaaacgacaaaactgtaacgaaatcaaagacttaaattaatggagagatgttccatgttcatggatgggaaaactccatgtttttaagatgtcagttcttcccactttgacctgtcctaatcaaattcccagcaagttaatttctagatatcaccaaactgattctgcatttatatggaaaggcaaaagacccagaatagcctcgcagtattgaaccaagttggagaactgacactagcccactttaggacttactgtaaaactacggtaatcaagacagtgtggtgttgctgaaagaatagagaaatagcggctgggcgtggcggctcacacctgtcatcccagcactttgggaggccgaggcgggcggatcacgaggtcaggagattgagaccaacctggccaacacgatgaaaccccatctctactaaaaatacaaaaaaaattagccgggcgtggtggtgggcgcctgtagtcccaattactcaggaggctgaggcaggagaatggcgcgaacccaggaggcagagcttgcggtgagccgagatcgcgccactgcactccagcctgggcaacagagcgagactccgtctcacaaaaaaaaaagaaaagaatagacaaatagatcaatgaaacatcatagagagcctgggagtagatccacccagtaaatccacccagatagtcaacccattcacccagatagtcaacccatctttgacaaaggagcaaaggcaattcagggcagacagaaaagcactatttcttttcaacaaatagtgctagaaaaactggacatgcaaaaaaaaaaaaaaaaaaaaacccagcaacagtgactctagacagtgatcacacaccgttcaagaaaattagctcaaagtgagtcatagacctaaatgtaaaatgtataataatgaaacttgtagaaatgtaggagaaagtctaggtgaccttgggtttggcaacaagtttttggataacaccaaaaacactgttcatgaaaggaaaattgataagttggacttcgtgaagattaaaaacttgagctttgcaaaatacagttaagagaattaaaatatgagccactgactgggagaatagatttgcaaaacacacatctgataaaaacctggtatcaaacaacacatggaaaataagggtgtttggatgggtagggcgggatgacctagggaggacatggaaagttagtttcttttttaaaactccagagactctcttctggagctccccttgccttttttattacagtcaacctgagatgggaactgaaaatatggccgtagttgtcatgaactggggggagccactactctgtttttaccctcattaaggaactttattgtgaaaggtaaaatcactttgtaaatgtgaattagaatagaaaatggaaattccttatatactctctaagccactggaaacttgaggcagagaagttttaaaagacgcacatggatttcctctgaaatatttgtaaacaccaaattcagaacatgttggttagtttaggaccataccaggctttagttgttacattgaattgtaaataacttatattcatgagcctggaattaaagaaattcttggtatgagaatttgacaactacttctggcttccaggagccagaacccaccttcgaatgggattttgaaataagccccgttgaagagacacacagatggcagaggccgcagcacaggctgtgagaccttcttcaggtttcggtagactgtcttcattacggcgtaaaaacatgtcagatgaaatttcagaaactatttccaaactcagtgaaggttcgtgacatctgggacgttgttgttttcaacacagaagttgaatgaaactgctacagaagcaaaatgagaagtgtggagaggagatgctgtggtggctgggcattctccctccttcccctccctcccctccttctctcattcccctccttccctccctgacctccttcccctccttctctcattcccctccttccctccttcctctccctcccctccctgccttacttcccctccctcccctccttcctctccttcccctcctcctccttcctctccttcccctccttttcctccttgcttcccttccttccctcattcccctccttccctccttcacctccctccccccatcccctctctgccctccttcccctccttttcctcctttcttcccttccttccctcattcccctcattcccctccttccctccttcacctccctccctgccatcccctctctgccctccttccctccttttcctccttccctccttcacctccctccccccatcccctctctgccctccttcccctccttttcctccttcacctccctccccccatcccctctctgccctccttccctccttcacctccctccctgccatcccctctctgccctccttcccctccttccctccttcacctccctccccccatcccctctctgccctccttccctccttcacctccctccccccatcccctctctgccctccttcccctccttttcctccttccctccttcacctccctccccccatcccctctctgccctcgttcccctccttccctccttcacctccctccccccatcccctctctgccctccttcccctccttttcctccttccctccttcacctccctcccccccatcccctctctgccctccttcccctccttttcctgtccttccccctgaggcctcaaagcccctgtgcctgagctgtggacaagaaacacgcctgcctcagaagctgcctggagctgggtgaaggcttccattcagctcgctgtcatgctctcactcagaggagagatcatgcagaaattactgaagtaaaatgctaatgtgttgagttaatgatcacaggtttacgttttataaaagacatcttaataatcaaactattgttgagctaccttgcgttttatcttgaattctctggagttaggtaatttacatacgtgtttcagagtacacactttgtttaagctgtcttagctgtcaacaaacactctaaattatgaattatgagttttatatctaaagctaaacattttgtactgtaaaatccagtgctacttactatgccctagagtaacactacaagagtaaaatctgatctcaatgatggatgtttgtttttcttttatgcagtacacattttggaactttatacccaagaatttatttgaacaattcagaagagtagccaacttttatttccttatcatatttctggtgcaggtaaggccggtcattgttttccatctcatcacatataaatctaaataagtgacattttattctcaggtaactgccacacggctaatgaaagagcaaggacatggtgcccctcacctatgattaatttatttattttcttaaggaagggcaaaatgtcttggttctgtgagatccacacaagctaaactacacacgacgctactttgggtttaagttggtgacagcctttcctgcccctttccttctagtaccagaggggaaatcagagctttgtcatcatttggacaagttcactgccaagctatgcatcgttacacttaatttactcttcctaagtgtgtgtggatgctctaaagaaaatccaggccgggcacagtggctcgcctgtaatcccagcactctgggaggatcacgaggtccagagatagggaccatcctggccagcatggctaaaccctgtctctactaaaaatacaaaaattagctgggtgtggtggtgcacacctgtagtcccagctacgcgggaggctgaggcaggagaatcacttgatcccaggagtgggaggttgcagtgagctgagatcgtgccactacactccagcctggcgacagagcgagactgtctcaaaaaaaaaaaaaaaaagagaaagaaaaagaaagaaagaaaatccaaagacagtacacatgaaaagagagtttaaaggaaagaaaaaaaagagtgaaaaaatatctcggggtatgagttagggagcaatgtgccaaatgtgttttaagaacagcactctaatttttctaaatcatacaaaatgctactgaaggactttaaaaatttttccaacattaaattattcaaatcatgtaattaaaatgtgacactgaggccgtggggtgaattaatacaaggcgtgccccgacttcagactgggtctgccactctcggtggtttccttgagcatgttccttaatttaaaaaaggtgccctcattttaacagtcagtgaaataggacgattgacttgctatctcccgtggtgggcagtcaggtgccagcaaaggtctttaaataagtcaaagcgaatgggaagtgctggctcagggcaaactaacctgcctgaagtcactcatttgtgtttttgaagatgattttacaattctctctttctgcagttgattattgatacacccacaagtccagtgacaagcggacttccactcttctttgtcattactgtgacggctatcaaacaggtaagcattttacagacgaaaaagaagcaatcgtcatcttcaccatgtgaattgcctttcattcaaagcgaggtgattggtttgttgtagctagttcacagaaaattcaaccaagttctagaaattcatttttataactgcgttagattgatacttgaagcgaaataagagatgttatataatttagttgctagtctggcaccatgcgagttcgagaagaaatctgtggttttcacatcccaaatcacccagagatgatctgatcagatgagtcacttaacctttctgtatccttgactgtcttgaccaccacagaacatgctgtttatggactccagcaaatgggatgctgttttttgtttgtttgtttttggttttgcttttttttttcatagccccagtaaataaggccagtgactaacatggagaagaatacatctcagttttactctctacgtatccattttatcacccccagattccctgtacacgtgttcagtccctccccattttctcctccccgtccctggcaaagactcatgtttctgtcaccgtagagtcgcctattctaaacatttcgtactcacggctcataggcggtgttttgtgactggctctttcactcagcatgatgttttcaaggtttctctgcatctgagcaggcgtcagcgcttcattccgtctgatgaatgagtcacggtcccctgcacatacctggcattttgtgtatcacgcgtcctctgtggatggacatttggggtgtttccactctttggctgttctgaataatgctgctgagaacatttgtgtttcacacccaccagattggctttcagatgtgaaaggctggagagggcatggcgagggaggcaccacgggccgccggcaggagcgtggcggagccaccaagcacagcagttggcaacatctgacacaggcagagatggggacacacagggtccagtgcagatgataaacatgcagctgtgcagtcagtacatggggcctgtgtgtcttcactaggccagagccggccgtgcctaccgggatacgtgaactaggatattcatggtggctgtcattgattagcaaaggactcgggcaacctggtgtccctccgtaaggaaatggacagctccgccgcggtgcatggcagaacacagcacagtaacgaaacgaactgtgctgcctggagaacagaacatgagggagactcacgcttcccaaggacgcgctgcctgtgactcaggcagtttaactcctacctgggataaggcctcacttcatgtcggtggcaggctcttgcaaacttcaactttaagcaaaacgatgggttttctcatcaacttcacaaggaaatggtgctgaaggaaacgatgttactcggggacctgccatgtgtcctcgggcccaaagtcacagtttccaggaacccatcgtggagattaggtgagggcgtcccgtgctatctgtgatacatctgtgtggtaggagcagaggctgcagacaggaaggagacccctgagcctctcaaggggagcagagagaaggggcgcgggggtgcagaacaaggggctgaggctctatggctctgttctttccagcctggccccaggaggcaggcgtagcactgttcttcagcgtcctcttctctgcatttgttaaggattccatccctcccgggactctactgagcaggaaactcctgagatctccaggagtgtcctggaggagaggagaggagagcgtggagtagggagggcggctctgaagacgcatctgggccagagaggcagcggccggggagcccgagcccccatggatgcagaggctgcctctctacactgtgcagaccacggccccagacaacatgtggtgtcctcggcccggctgtgccccatccctggctgtgtcccctcccatcggcctggctatgtcccctccctggctgtgtcccctcccatcccagggcagtgggcgggcgttttggggatgttaagagggggtcagggcaaggcggcaaatgaacagagctgcagttctgggccccatcaccagcacccctgcctctgcccagaggggtctcttcctctcccgcgcgtcctgctacccagctttcactctggggatggccttgcttcccctactgctggtctggacctgtgtgtgccagagcccccccaccccctcgaccttcccccactactgacctccttgtccctcttccttgggaacagcgcctctgtccgcagctgggactttcccaaatggcctccccacactgtggctccagcagggctgtttgtgctggggtccccatgctcccggcccctcctcgcttgccttggaaagccccctgcactcacagaggcctccctgattttctcttaggtccccgcctctcttttcacaccatctccccgctgtctccgctgggcactgacgggcatctcactgtacctggctctgccgccgccatcgcccaggtcctgccagagcggcctttccctgtggcacccagcctcccctgctatgtgcagggcccctccgatcagcccatcacatgcatgggcctccacgtgtccttcccgtcccagccaggctggctggtgggcagtgccagcccctggggactccctcaccgctgggcattcctgggcacctcctctttggcgtcttcccgcagcccgggcgctaggcttttcggggatcctgggtgtctctcacctgcattgaacttgcagttatttctgtttcttctccaccaatcctgagagcagcagctctggggacaaggtctttcgtctgtgggcccctggtgcctggcacttgctgagcatgcagttggtgctaaataagtgtgtttaatgaacccaggaatcatctacccactgccaccttccaggaagactgttcttcagtttccccagaaagagagtatttcagcgatttgggaggaatctctgaaaagcaatcagatgccacagtgtcacttattaatggtcacagctggagaaagctcgcacgtttggatatccatgcgtcccaggcttcttaattctccagaagctggaggttttgggttacttgtttatgctcccttcggaggagactccagtcacagggccactgatgccgccacgtggcccacagggaggaggtccccagtgagcctcctgccccacaggctcttgcaacctacctgcagcgggcccgtggcacaggcttcctgccgccatcctgtgtggttgtgtgtctcagcacacatgcagtgggcccgtggcacaggcttcctgctgccatcctgcgtggttgtgtgttgtgtgtggcagagctgtgtttccaatttcgacactcattagatgcggtggacgtggacgcccataggcccctggtgtgcagtctctcacatgctggggattgttactgagaacggcattccccatccttatctaaggcacctgcacccagcaacgccaaacacaaaggcacgtttgtcatcccaggaatcatctgtgtgcagcatctcctattgtcgcttctttcaagatgccacctgactgtccaaccagagggtgtgccttcgtagttggaatcggagtgcacgtgtctgcgccagtggaaggcatccaggtccgtcagcgcggccggggtcagggttagctcaggctgcttttccagccccctgcctgtgcgtgcacgggagtcacgatgggatgtttcccgcgtgggttactcagatgcggaaacgcacagagagccttaaggctgctgcgggtgtcacagagtgagccggcgtttcaccgagagtctgggctgccagatctcataacaatcagtttttaatgaaagagaagaatggccagtgggggcttttccaagtggaaggttgacactcagcgggtggaaatgtaactggctccacgtcttcggggcttttcggtgtggatgtgaagagcctggaaggcttgctcatcatttcattcagacacttcttttttaggaatttatcctaagtccatgtcatgaataggcacaaaaagtacagttgtatagtacttatacacacttcgatgagcatctttctccaacgtcttcgaagttctacaactgcagacatttaaagcagctcgcgttgccatggaacatgccgatgctctgtcaaggatagtgtgtgtagtgcatcctcatgctgaaaaatacacccccacaggcttggattatgcttagacataattaaacacaagccttctgtctctccctccctttctcctccttccctctctccctgcttcctctctcccttctttccttcctttttttagggttatgaagactggcttcgacataaagcagacaatgccatgaaccagtgtcctgttcatttcattcagcacggcaagctcgttcggaaacaaagtcgaaagctgcgagtaagtgacacccgacacatttacgctggtgaagtccagtaactgtttaaaaaataagttttacccaggtgcagtggctcgcgcctccagtcccagctactcaggaggctgaggcaggaggatcgctgagcctggaagtcggaggccactcaggaggcttcaccgtgcctgtgaatagccactgctctccagcctgggcaaccgagaaagaccctgtctcttaaacatttttaaaatacaaataataaatgtttttaagtttttattttctttggcaaaacagactgagatgttttttattgggtgtaggcccaagctccctacttcttttttttttttttacctttaatttttatttgtttatgtttaatagactttttagagcagttttaggttcacagcagcattaggtggatgtacccactgccccttccaacacacacacacacacacacacacacacacacacacacacacacagcctccctctgccagcatcccacaccaggattggtggaatataaaatcattatcactgcccccatccccacacacaccctccctctgccggcatcccatgccaggattggtggaatttaaaattattatcaccacccccatccccacacacagcctccccatcaccagcatcccacgccaggattggtggaatttcatcccacaccaggattggtggaatttaaaattatgggaacacacgaaccaatcaagacagagaaagattggaaacactgtttctaaaatttgttttagaataaagtataataaaatcatatcaatataaactcgactaggtggaaatttatgaaaattggaacagaaaacttcattgaagattgcatttttttaaaaaaaatgtatttatttattttttaagagacagagtcttgctctgtcacccaggctggagtgcaatagcataacctcagctcactgcaacctccgcccccgggttcaagtgattctcctgtctcagcctccccagtagctgggattacaggcgcctgccaccacacccagctaatttttgcatttttagtagagatggggtcttaacaaaatgttggccagactggtctcgatctcctgaccttgtgatccgcctgccttggcctcccaaagtgctggaattacaggcataagccaccgcatccggccaaaaaattgttttttattgatgtataatagttgtacgtagttgggggtccatgtgatattttgatgcctgcacaccaatgtgtgatgatgaagtcggggtaactgggatgtctgtcacctcaaacattgattctttgtgttgggaatattacagttcttcttgaaggctgcattttaaatctgtttcaaatgaattatctgtgtaactaatatctcaatatgtttcaaaatatgtgattaaattatttaaatgagatagtttcaagcttatactagtcatttggaagcacctttataggtagaaaccatgagtgtggtttttcacgtttgtgtcaaggtagcggtcagcagcctgctccagtcccccatctgatgtggatctaggtgccaggcccacaccggccccttcctgcccccactggtcctcgtgcaccctgcctggctctttccaactcccacgcctccctccctcgtgcagccccactgcctccctggctgttttcccagctgagccgtaggaggtttggtgagggaggcagggagcaccccagtcctgtgcatgtggagagccaggtgcgttccagaagcctggagggagggcctccaagcagcccagccagcctgggctcagtgaacctctccggacaaggccgcagcccttccctgtccagtgggacgggaccccaggaggcactcagaggcccttcagaggagccagcatcaaccactaaccccccaccgctcaccttgctctcactgttctgtgtatcacacacgtcaccaaatgtacttttaagcatttaaacattttcacttataaacgtgctatccaggtgtttaaatgcttctgagacagcttttcccttcagtgagttcagatgagtgatgtttccctagaggtcgggggttcagagagcagatggccctggcctggggaacagccgcgagctccatgcctgtgtcagcaggcatccggtcccaggccttcaacgccatttcctttaatgattatatttcccttgcaaagccttcatacttgtagctaaacatctttcttaaaaaatagacctaaacagtgtctgcccacagaaaattgaatttttaatgtatcggtcttctgtgggaaatgccagctctgtatcctgtgtgtcgtaaccaagaggatgctaaacaggctactcaggacgagaaagaaaagatcaggcttttcctacaacggcagacatccagcttccatcggtcgtaatggctcaggcctttgagagtgctagagcgtcctagaaaagcagtcctttaattagtttttcttttttaattaaactttttatttcgaggtaattacgggatcacatgtggtagtaagaaataaaacacaggcatcctgtgttccatttgctcggatgtgctgcccagctctaagattttgtcatctcaaggatatgatataaagagaatcctgcagcctgtgaccttttggggttggctgttttcaggcagtctaattccctcgggattcacgaagtctgtgcaccagccattccttcccttgtattgctaaggagcgttccatgatgggggcgtactgcagtttcaccattcacaagttgaagggcttttcgatttttctagtttggggctgttatcaagagagctgctatgaatatttgtgtgcaagttttcttgtgaatttagttttcatttcttttgcataaaagctcaagagttggattgctgggtcatctagcatatccacgtttggttttgaaaggaactgccaaatggttttccagcatggccatcccatttcattcccacgcacgacgttgccagcatcttcaccagcactgggtgttactgctgttcctgatgtctcggtgcagcttaaatatgtccctgacggctctgtgggacatcttttcacgctcgtttgacatctgcatatccttgtcagtaaaaataactcttcatgtcttttatccatttttctagctggattctttgagcttctttttactgttaaatgttgagaggtcatataatctagatagtaatactttgtcagatatatgatttttaatactcagcaggatatttcacaaagcaaacgtttttaattttgttcaagtccaatttcttgattttttttttcttttttttaaaattattatttcttttgagacagagtcttgctcttgttgcccaggctggaatgcagtggcgcaatctcggctcactgccacctccacctcccaggttcaagctattctcctgcctcagcctcccaagtagctgggattacaggcgtgcaccaccatgcctgtctaattttttagtgttagtagagatggggtttcaccattttgcccaggctagttttgaactgctggcgtcaagtgatctgcctgcctcggcctcccaaagtgctgggattacaggggtgagccaccacgcctggctgattttttttttttcttttgaggactgtacgttcagtgtcctgaatgaagcattctttgcctggtcctagacccaaagactttctcccatgtttctttctaaaagtgttatagtttcatgttttacatttaagttcatgatccattttgagatgatttttgtataaggtgtgaggtttcagtcaggtttgtttctgtccttattattttgcccgtggctgtcttgtcgcccctgcaccaggggatggctggctgtcccttttccacggagtggcgcttgtactctgtcccagtcagttaaacacatttgcatgggtctgtttctggttccctggtctgtcccattggtctccatgcccatgcccaccaatcccacactgttggtcactgtagctgtctcagaaggctggacattggggatacgtattccttccccctcaatcttctttttcaaggttgttttagctattctagagcctgtgccttcccatataagttttagaattagctcatttatatctataaaaatccttgctgggattttgatagggattttactaaacccaaaggtccatttgggaagagtaaccctctgattttaaagtctcacaaattcgcagtgtgctgtgaccatcgtgtagtgggacagagacctctgtttgcagtgtagacagaagcaggtgacgccctgatcctggcatgcctcccgagtggcagtgagactggctggagccctgcagtgactcactcaagggttctgatgatcgtttccccttcagacatgcagcccagatctgcaatggcttcctcacccttcagacacacagtccagatctgcgatggcttcctcacccttcagacacacagtccaggccactgagatgccttcctcacccttcagacacacagtccagatctgcgataccttccacacccttcagacacacagtccagatctgcgataccttccacacccttcagacacacagtccaggccaccgagatgccttcctcacccttcagacacacagtccagatctgctatgccttcctcacccggcagacacacagtccagatctgcaatgccttcctcatccttcagacacacagtccagacctgtgatgccttcctcacccttcagacacacagcccaggccactgagatgccttcctcactgatgaaataaaatggatacagacacaaactagaccatgacctttaattaaaaacccacatgatcaactttctgtgattgatttttactttagtttttgaaacattgttgccacttttgctttatttgtcctcatgctttgatgatctgggcagcgccttggttctgttgatcaggaagctctcagaactcgattacctggttcataaaacgcctagatttagatcaaagcttctcacaggagtacttcccacttggccacgctcacagaacactccaactcgtcgtcttggtctgaatcaaagataaccttgttacaggtgtttgtctgtgtttttgctgcggaagttagaacattgaaacctgacctggtctttccttggtcccagcagaatgtctggcaagagtcttttcctgaaaccgtgtccacatccccgtgtcttcctgtgaatagatgagcagcttgagggaagcggtcccacaggacgggcaagctttcacggaggggctttccattgaccatcctttctgctttgtcctgtaggttggggacattgtcatggttaaggaggacgagacctttccctgcgacttgatcttcctttccagcaaccggggagatgggacgtgccacgtcaccaccgccagcttggatggagaatccagccataaagtaaggggccttttcattagactccagggcaggatcttcctgtcctgcttcggactgtgcccatgcggccacagaaactaacatcctgtttgaaaagtcaccgttttcatgtaacccagggagttacaccagccatgtttttcctcacttttccttcctcctattttccactttcttctttttcctttttaaaaataaattgtattgtgtatatttgaggcatatattatgatgttataagatacatatttttatagtgaaattgttattagagtgcaacaaattaacacacccacatctcactgatttcccattctctcccctggcacccatgcaggagcagccataacctactcgatgcggcaaaaccctgagcccagcacgctcttgtccactcagtgcggcaaaaactctgagcccagcacgctcttgtccgctctagtcctcgtgttgtacgttgggtttttggacagttcatcctaaataatgctaccttgtgttttttgacctacacctccccatttccttttcactttttctttccagtctcaatgtctgtaacaaccaattacctcaggttaacaaaaataacttcagtgttaacctgtgtcaattagctaatgtaccaaattcaggatttaatgaatagattgttggaattttaagaattttcattttattagttaaaattagtgtgaaaactggcctagaattatgtgaaaagtcacacacgattctagattttgcctgttacttcaatgagtgtctttttgtgaatgtatcttagtcaggattttctgaaattactacataagtaatttcctgcactcagtataaaattctgcacaggcagttgatgctacaagaattttaattgtcaatcatacaagaaaagatatagcaccattaattttaagattcttcttatttaaaaaatcttgaagtttctaaggagtttatgaaagtgagcatagctcagtggattcaactaagtcatcagctcacaaaattgcaactctaaaatggtatttaggtaatacgtatggatataggccatttctactatgagatagagacattttctttacaaaatcactgaaggatatgctagtctttcatagataattcatgatatgtatcatgaattgatagatgaaaaacctatggatctttttcagttaaattagctttcacattttctgtgtagcatatcccaggagaatgaacacgctaacctaaaagattgtcagcagtttctagggggtcggaatccctggatgattcaggtattcgctgtaagcgggtgttggtccctctggaacctgggaggaggttaaggttccatccacccagagaccctgtgagcccttcacactctctgcagccagtcgctgcctttacaccccttccctgcagactgtggctggtcaggctcagatgagtcccagccatgctagtgaacagatgctgtgggtctccagatacaccatgtttgtccagatgaaatgttgtagcagttgtggaagatgttaaaacagctattgcactttgaccttttgtggctttgcagtttgcattatagttttgtgttctctaatgtcctttttgtgcattttgtttagcttgagggactggaattatttgagccctttccttaaaagcagagtaggggcgtgggaagggtccacccgacctctgtttggatcccgtggggctcacgtgactgcacaggcctgttcacttctctggactcttcacatttgtgaaatggggacaaccctatctctcaggggctcttgtgaggataagattagaaaattcctactgaatttagaaaataagcgccccctgatttgtgtgcttggtgacggggcagtgactgttggtgtgcttggtgacggaacagtgaccgtttgtgcgcttggtgacacggcggtgaccgtgtgtgcgcttggtgacagggcggtgaccgtcggtgcgcttggtgacgggcagtgactgttggtgcgcttggtgacggggcggtgaccgttggtgcgcttggtgacggggcgatgaccgttggtgcgcttggtgacaggcgatgaccgttggtgcgcttggtgacggggcggtgaccgttggtgcgcttggtgacggaacggtgatcatttgtgtgcttggtgacggagcagtgaccgtgtccccctgatttgtgcacttggtgatgatgcagtgattgtttctcccatttgttctgactcctgtgttttatttgtccaatactcttccactagaaagaaacacaggaagggattcagagatgctgttgcctcttcgcagatccctgggcacaagtttctcctctctcctcccaaggcagggccggtgcagccctcatgcccacctcaggtgggccttcagccgacctgctggtgctcacagatgctactgaggtcaccaggcctcaaaatgtgttctgagagcagcagcatcggcatcactgggcaccatattagaagtgcagttctcaggccctccctagacccactgcatcagaaactctagggctgagcccaggaatcaggtgcttcagaagctctgggtaaaactcacgttgagacaggcttgaggagccccccggcccaggccatgtgaacagttaagtagaaggcctgtgccacccaacagcaacgggcacaggcaggttgttgccgagaagtgaaaatgaagtgaagtgatcctgtgaccgctccccgtaaacaacagggcgttctgtaaaaggaaagggatatttcaggtcctggatttgtttcctaattaatagctactactatgacagataaatcagtgtctacccttgaagaattcgagcattgctatctgtcctgttagttttaagtggaggacactgggtaagaatggaaggatgagaattttctggcacctgataggtgcaggaataacagtagtaccttatctttctgtaactattaaacatttacaaactcatagggtcagccaggctttgtaatcacttggttggaggcaccagcgtctgggtttgtgttgaccgttttggcggtgagctcacatgtcttgtgcatttgtagacgcattacgcggtccaggacaccaaaggcttccacacagaggaggatatcggcggacttcacgccaccatcgagtgtgagcagccccagcccgacctctacaagtaagcgggagctttgggttctttagaaacggttttttatgccctcaacattgctcttgctttttcaccccaagtagtccagccatgtggtggtttggaaagagaatgtaaatcactgcttaaagattaagactgagtcaaaaatacattacttatttattctcatagacttgtaccactcagatttgtagctttttatacaaatatttgaagtggcttcgtggaaccatatttgtgggaaaaaaaaagaataagttttctttattttacggaagacgtttgtaaactgtgggttaaggaaaatcaccgaagccatgagctgatcagaacagaaagtacgacaagggaaggggctggagcggggctgctttagccgcacacggagcgggccaggtgaagacgtgtggctcacagaaggcaggtgggccaggcgcgcgcttcccgggggccgctgggcgcgtccggtcagtaacgtggcttttctgtcgccaggttcgtgggtcgcatcaacgtttacagtgacctgaatgaccccgtggtgaggtgagtgcctctgcggatgccttggccacggtcacctcccttgttgcgttagaaatgcattctttgacggacaagggtttccacggcggctgctctggtagatttggaaggtggagttccgctttcccacagggccgggctccactctcgtctctggtttgtctcaggcacacatctgtgaatgttgacaagttagtgatgctcgtgaaacaagttttcgcgcaagactctgccgagagggtcgtctcacaggccaggaggcgtcagggtcccgtggagcagtttcaaagtgaagggcggagtacagcttccctgggagaaatgccctttcatgattcgggtactgatttgtcttcagatatgaaattgaaagacttctaatttggaggccgtttttgggaatctgttcatccactcaccatcattctggggtgcattactggctcaaggcctatctgaggctcacacctacctgagaaggtggaatcggtagccggggcaaggccgggcagctcacggttggctgctgtgccttcccattcaccagcatggacccagcggcagtcacatcgcatacccatgaggaaacagcgaccctcagacacctcatctatggccccgaggcagcctcggctgagagccagcctgtgctgagcccagctctgagcagcacccacctcccaggcctagggatattttctctgacattatttcaagatctagcatttgttgctgacgagatatttgaatgtcacagtttagggaattggctttcactggattttaaagttgcatcttcttcataaactccacttgttagggaaatgatttttcttccattgtaagcactctccaagttgttgatgtctgggtaggtacagcattgtgtgttaaacaacacatctcccagacacagaaacacactcactgggaaactactgcaaagtgaatagttcctgaaatgcttagctccttgtaagtctccaggagctactgttttaagaaaaccatttgtgcacttcttagcatgtgcttgttatcattacccatcagcaggctaggaggtgctttcgagaactgatagtgaccttgccttggtttgcctacgtatatactgttctaaaggtaaattcctccttactttggagaaatctcttgtatttctgtgtgccgtgagaattaatttgtgtttgaacagacttaggcttattcatattacctatgggatgaatccaaaatagtaaacattgcaggcttttcatctttatagttagaccaagtttattgctgaacaacttgggacgataattgctaatgtattttgcattttgatactaactctggtttcacttttattttatatattttattttattttattggagacagagtctcgctctgtcaccagtctggagtgcagtggcactatctcagctcactgcagcctccacctcccgggttcaagcaattctcctgcctcagcttcctgagtagctaggattacaggcgtgtgccaccatgcccagctaatttttgtatttatagtagagatggggttttgccatgtcggtcaagctagtctcaaaacgccctcaggtgattcacccacctcggcctcctagagtattgggattataggcatgagccaccgcgcctggcctagtttcacttttaaatatttatggtattccatagacttttaatatttagattattgaagatgtttgtaaatttgtgatgtggacagttaagaattacgcacccaaattctcaatccattcagagtgacgtttcttcttccttctgtcctaactagaagcaaagtacttttccaagtaaattatttttagacttccctgagtcactttttaaaaacgctgtttgttttcgtaaacacatggcaggaattattataagtgtgttgcaaacagaagctgacagtccttataacacagccagacaacccatatgcagcctgggagctccatctttagtgattgccggggaggacgcgcgtggagccctcagccgcagcctggggtagacagccccactctgcctgtcttcagccggatgcagttctgaggtctatcgaccaaatatactgcatgcattttacattcataatattcagtaggttcttaattttccatgatagaaggacagtaaatacaatgataaatgaaaagcaaacttcagcaaacacttttgaccctttaccctctgaagcaatcctctgaatgttatcaatagcaaaatttatacatttgaatcttgctgcttatttctcccttactacttaggaaatgagaagagattatttttccatcagcagggaaccctgttatatcaagaatataagcccctgatggcagagaccctgcctgctgcttatgtggcttcagtgcacagaacggggcttgttcttccatgtgtgagatttttaagttctttggctgttgcttgttttccccccaaagcagccatgcatggattgtcccagatttacatgtcccccccattcagaggagctttgcagtgtggctaccagtgtttctaatggccagatagagtatcagcctttgtctccaggaataagactgtgtttcatgggactccctgaatctcactgaggatgtaatagaaacaattgaggctgggcatggggatgcccaactgtaatctcagcactttgggaggccaaagctcaagttcacctgagcccaggaggtcaaggctgcaatgagctatgatcgtgcccccagcctgggcgacagagtgagaccctgttgcaaaaaaaaaaaaaaaaaaggaaacagttgaaagttgagtgacttttattttatttcacatccacccctctttagcctttccagaacattctgggaccttccagtgcagctgttctcaacctgaggcttgttaggagagggctgctgggccccaccccagggtttcaggttctgactcggtaggcctgggacgatcttcctgactagtgtgatggttcctgactggctccaggtgctgctgacggcactggtggggccacctcagggacccctgctctagaggtctctcggggagtgttgctgaggctgccgggcgcagctcagtgggtctggatggggcctgaggtcccgcatgcgccaatgggaggcccttgccgctactcctggagccatgtgttcgtcccccaaagataagcccacatctgttcacatggacctgggctgacttaatcatctgaatataagcaaacctccgtgtatgccatctcctctgaaaatgagatctgctgagcaaacaagtgggtttcacgtctgcctcttgccccccgccctgcccacttgccttcgtgtccgcatcatttctgatcatcgtatctttacaggcccttaggatcggaaaacctgctgcttagaggagctacactgaagaacactgagaaaatctttggtaaatatttaattaattattaaccattgcccctaacattaaggatgcatgaagcaaaagttaaaacccgcagcggaacccgagagcgtttcttggcaccttgaggtgctggaggctttctggccgcgcaagttctgccccactgagatttgatcagtgaataagtgcaatcctgaagcagcagcatcagagaatacggcttacggattaaggcctctagttttggattcagaaacagaacattgcatccgtgaaggaatttgtgaagtttagttgtgcaggaaatgtttttcatgtctgcgtttcttgactaggatctcccatttcttgtgggttattgtctgttttaattgaggtaacctttagaagtatacaagtgtgccccactgtcagaaaatgctgtgcaggtgttcctcagtgtccttgggggactggttccaggatgcctgcagatgccaaaatccacggatgcccaaggccctatttgcatgtagcctacgcatgtctgcccctgtagttcacatcatcttagattacttctgatacctagcacgatgtaaataccctgtactgtttttatcgtctgtattttgtatcattgtattgttatttttattggggatttttttcaaatattttccatccccagttggtagaacctgcagattaagaactcgtggacatggtgggcccagtgtatattaagatatgaactcttaaaaaatgaagcatagattgcttcctatgcatgaagaagggtctttatcctaaggaatcaagtgctagtgttatgtggctatggacactagcttatgaaattaaaaataggattcgctttacccaagaattgattttccccgcagctgtgtgtaactcaccataaggcaagacacacttgcgccctggtcatcacccttgctcttcctctctgtaggtgtggctatttacacgggaatggaaaccaagatggcattaaattatcaatcaaaatctcagaagcgatctgccgtggaaaagtaaggctggatgcgcgtgagaacctgcaacttaaaagtgtcattacccactgtagaaatggaagtagcttcctcttggccttattggcagttcctttgccactgtacagcatcttagtaactgcagagctgaccattcagatggtctttcttattttgtggtgaggtggatggccacacccctccttcctgctctttctaacgcctgataccaggttcacagcgctgcctcttacggacgccctgacgttccggttctgaaatcagttcagtatccaacagctcctctcaccatttcatgaaaaactccaaatgggcttacttttaactctgggatttggtcaaaaccacgtattctctgctatggttttacaaaggaaagcgttagcagagagaacagaatcatcttttcattaaacagtaaagtcctgatgataaatatgtcaggatggtagctgaatttgtgctggaaaagaaaggcttcttcctgagatctgctaagaccttagttaaggatctgtgcttttcctgtactgaggacacttcctttcagagttatttacttttctccccctcctttcctccctccctctcttccttcctctcctttccttccttcctctacagtggtgggtagtcactaagttttgaactaatttgttgatgcttaatggtagaaattgatttctggatgtacttttcaatgacggaagtccaggcagtgcagaagcatggtccgcagtgtggctgtgagcagccctctctctcctgcttgtggcactttaccccgtcttggttcttacctttgacctctagaagtacgtgccagggaccatggcatggacgcaagtgcagaggacccaccgtggtgcgttgagggcgaacacatcactgtgcccttcctattctgtttcttcacgaggtgtcatcttgatatctgtgagaaggaagtgcagagctcatttcctcagggaccagtgatcacctctgtccttttgttttagatcgatgaatgcgttcctcattgtgtatctctgcattctgatcagcaaagccctgataaacactgtgctgaaatacatgtggcagagtgagccctttcgggatgagccgtggtataatcagaaaacggagtcggaaaggcagaggaatctggtatggagaatcactgcccttgtatgatccgaggtgacctgtgggccattattacgaaaatgtggtgcaagaaaaagatgacggtgaatttactgtaggcaaaaagcagcttgattgattcagtctctgtgatagatgcattcactgaaatttaaagtctcagtggacaccagctgctcctgccatctttggatctggaaaggtacaggttcccacagtgaaatcatcaggacaataccttaaatacttgcactgtgtcctttgtttagagagtgctgagaaaatgcttgttaatgattatgagataaatggcacatatttgtggtaaatacttggaaaaaagggtctgctcccagtccagagcagggccatgtgcaaaccgagacctgtgtccactgagcctagagcaggactgtgtgcaaacccagacctgtgtccactgaccctagagcagggccatgaacaaacccagacccatatccactgagcctatagcagggccgtgtgcaaacccagacctgtgtccccactgtccagagcagggccgtgtgcaaacccagacccatatccactgagcctggagcagggccgtgtgcaaacccagacctgtgtcccctccgtccagagcggggctatctctgcatcatctgtccttcccacaaaactaacatggccccacagatcaggataaaagtatactgaaaagtcatttcaccaggcttagtttttacatctgtaggttgttaccaagtatgttttgttataagagacacaaagagatcccatgaatatgcagaagtaaaattgccgctggtgtctggttggcgtgtctcctgtcatcggcacatgcttgtcttaactcgtgatttaatctccacttgctggcaggacagccccacagctcagcccctggacccggcaggtcctggctcagagaccaggtgacccagtggctgccttccgcccatagtccttgtctttggactctgaaatcttgtatttagtagtagcgctcgtataacttatgcctaagcctgaggtgttagagcagcatgttggaggcctgctgtccctcctggtggaggtgctgacccgcaccttctgctcttgcagttcctcaaggcattcacggacttcctggccttcatggtcctctttaactacatcatccctgtgtccatgtacgtcacggtcgagatgcagaagttcctcggctcttacttcatcacctgggacgaagacatgtttgacgaggagactggcgaggggcctctggtgaacacgtcggacctcaatgaagagctgggacaggttggtgtctcctgagtcatctgctgtgatttattaacatctgggtgagtctgcttcacgttcctcaggtcctgtgcctgtcatccgagcgtggctgtacctgtagctggcgtaagacagcagcagggttgttttgaaccctatttatgaaacagtcagccgtgctgttacatttacaacagatgcagaattacctgcacttgctgactcctggaaactcattggagcttcctgggcagaactctttctgtgtgcaggtgtgaatcaaggctggtgggtaaaagtggctttgccagccttgcactctgcttctgcacctgatattcaagtctcatggcgagctgggtattttcactttaaagatgaacaaaccagattttcagtgacttggtggattgcaaagagttcagacgcctccattcagatcctgctgctgcatgatggctgcgggagctcgggcttcaccgccacacctcgagtgtctcagtctgtgaaatggagatgataacagatgctggccttacaggattgggttgcagattaaatgagataatggacacaaggtgcacagcacagagtctggtgtgaccaccgccctgccaccgcaccaccgggaggcacacaccagacctgctggcttgaagggagctagggaaagacccattccctgggtttccccagcctagagcggtgaccttccctaccttcccagccttaacgttgcagagtgcagggttgccggagcaggtaccagtaaacggtaattggatttttcggaagaaatagcgattttgaaggatattttagcaaacaaggccactttagacaggtagctgaaatctccatctcgctcccagatgacagcctgtaaatagacttagactctggcagatacagaggcctctctctgcctcctgtgaggaaggccaacaaacggaaggatcatgttccacatttgatgagtttgacttttgaatgtgttcctccagcatgtcccatactcctcacagtgctttattgtttgagtcagcaatgcgcaaactataatttagttgttcaatagtcaggtatttttatctaggaatattctatctcctttgcaacaatagatggtacattttgtgagcttctgataaattctttgggaaagaacttttttctgtaacaaggaaagtgcccagcagcgttgagtgtgggggaaagcgcccagcagcgttgagtggggggaagcgcccagcagcgttgagtaggggggaaagcgcccagcagcgttgagtggggggaaagcgcccagcagcattgagtgcgggggaaagcgcccagcagtgttgagtgcaggggaaagcacctagcagtatggagtgggaggaaagcacccagcagtgttgagtaggggggaaagtacccagaagtgttgagtaggggggaaagcacccagcagtgttgagtggggggaaagcacccagcagtgttaagtaggagggaaagtgcccagtggtgttgagtaggggggaaagcgcccagcggtgttgagtggggggaaagtgcccagcagtgttgagtaggtgggaaagcgcccagaagtgttgagtatggaggaaagtgcccagcggtgttgagtgtggggaaagcgcccagcagtgttgagtaggggggaaagcgccaagaagtgttgagtgcgggggaaagtgcccagcggtgttgagtgcaagggaaagcgcccagcagcattgagcacggcagatttcttctctgccctcttcagtccatctccttggagttctgcaaaacagaatttaatttctgttgttctgtcctgaccaaaaccaggctccagcttggaggctgacctcctcgtacacaaagaagtgtgtactgttgctcacgggggacacactgaggtcaagacgggtggacaagcccaaaaggcaggttcatctgaccgcagctctgtgggtaaacgcctgtgcccactgtcgctgtgcagtacgataacacgacttcttttgtatgtgaaatagattcacccaccagtcaagcgtctgtgtccacaacagaaacaaccatctgccatggagatcctgtgccagaagcacttcgtgcaccttctctgtgtcctgtgcacactttatgcaccttctctgtatcctgtgtgctcagtgctattgcgccgtttctcaaatgagaaactgagtcaggagcaggcagtgccccgttctgcgatgcagtgctgcctcccgagcacgagtgccttggaacacaaatcttgcttcaggccaagttagcaggcaggcgtgcgttgtagtgagggccatcttttgttcctagagctgagggtgatggcagcattgaccagcactgggcttagggttgactgtcccaccaccagaaaagaaaattgcaggccaggacccctgatgaacaaagttgcaaaaatcctcaacaaaatactagcaaaccaattcagcagcatacaaaaggatcataccccacctgtgggatgccagggtggctcaatgtgtgcaaatcagtaagtgtagtgcattacgtctgcaaaatgaaggacaaaaccatatgattatctgtgatgcagaaaaggcattggacaaaattcagcatcctttcataacatctctcaacaaattttaggtatagaggaatgtacctcaacacaataaaggccataaatgagaaacccacagctggcaatggagaaaaggtgaaagcttttcctctgagatcagaaagaagacaaggctgcacacattcaccccttctatttagcatagcactggaagctctagccagagcagtgaggcaagaaaaagaaaaggcattcgtataggaaaggaagaagtgaaattgtttgctgatgacacaatcttatatatagaaaagcctaaagactccaccaaaaagcttttagaactaatcaacaaattcactaaatttgcaggatacaaaatcaacacccaaaatcagtagtgattctatataccagacaagaaactatttgaaaaagaaatcaaagactttaataaacttgcttaatagtaacaaagcaaacaatcttatctctgcgtcccgagctaacagaactgactggatttgtgtccagaggttttaagcttttgtttccacgttcttaaaactgggataataacacagttgatgtgttaataacagttgaagattaaatgaggctctgcccagtggctggcacaccctgagtgctcagtaaaggtcttttataattaattttttttattgttcactttcatggtcatgtttcctagaaatatgccacctatttagttatagctaaacaggatgataaaccaaacctcttaacatttgttatctcattcttatccattttacccttttaaaaatgcttttagggccaggcacagtggctcatgcctgtaatcccaacactttgggaggctgaggtgggtggatcgcctgaggtcaggatttcaagaccagcctggccaacatggcgaaactcccatctctactaaaaatacaaaaattagccagacgtggtggcaggtgcctgtaatcccagctactctggtggctgaggcatgagaattgcttgaacctgggagacggaggttgcagtgagccgagatcataccactgcactgcagtctgggtgacagggtgagactccgtctcaaaaaaaataaataaaaataaaaatgcttttgggattgaaaagcgtttattctaagttacttcaaagtcctgtataagaagggtacacaggttgaatatcccttattcaaaatgcttgggaagaagtgtccctgtggacgcgcccaagctcagtctcaagatgctgccgtgcgttccagaactcctaccttcagttattcacgataaacgtgtgacccatgagcttatctaaaatcagagtttaagacgggttgtatctttaacacatatcacagttttctctgagatttgttttgtccttatttgcttgaattttaccttctcaaccttacatggtattgtaggttttgacctccaagactgtatagagtaagttcgtcctctctgtagccttggttttttattgttgttgttaagattcgggacaacccacttacactctgtcttcccaaacaaatggagccctggccccacccatgtctctgtcccggggaatgggactatgagaccatactctgttttgctcccaacccagagaaggtatcccgaggcctccccacccatcctcctgaattgcacctgccaggactgcagggtcctgttggacgctgggaaggaggatgaggcaggagcatggctcagcccagtgagggggtctgtctgggggaaagcctttagaaatccaccgcctattcaagtcacagtgggagctggggaggaaacacggctgctgtgtgtctgagtcggggacgtgcgggcctccctcagagcgccctgacttgctgtgccctgcccgcaggtggagtacatcttcacagacaagaccggcaccctcacggaaaacaacatggagttcaaggagtgctgcatcgaaggccatgtctacgtgccccacgtcatctgcaacgggcaggtcctcccagagtcgtcaggaatcgacatgattgactcgtcccccagcgtcaacgggagggtaggtggcagcccccacgccgtccaagtgtgtgagtgagtgggcggctgtgcatgctgagtccaccccttttcactcgagtgtccaggaaaatccaggccctctctacggacttcagtgggagggatggtcagaaggtgcgatgtgtgtggtgtcccgttaggacacatctgctcagtgatacccgtgttagaattggttatgaaaaccatagaagcagggcaaacacacatgcatgcacccagacaccatgtgcacacggacacacatgcacacacgctcacatgcaaacacatgcactcacacacgcccagatactgtgtgcacacacacacatgcagacacacgcactcacacatgcccagacactgtgtgcacacacagacacacatgcacacatgcagacacacacactcacacatgcccagacaccgtgtgcacacacagacacacatgcacacacgctcacatgcagacacactctcacacactccctgacactgtgtgcacacatgctcacatgcagacacacacgtactctcacacacgcccagttaccgtgtgcacgcacagacacatgctcacacgcagacacacacatgcactctcacacacgccccaaatgccgtggctccagatctcagcatctctgggcagggctgaagtcccaggctgatgctgttcctgaatttccccgcacacagggcagcctcggggatcaggtcccagccggctgtggccctgagcacatcacttcaccttcctaaacgctgattctgcagctgcaggcgcaggataatagctccaacttcttaaggggtttcagggtgaatgtgacaatgtgagtcaacagcaggagcgccacaggtcacgcctagtctaacacacgctttggttaggagaacgtccccatcgcacaggcaccagggcagaggcacagccagggtccagggtgtttgtgaatgtctgtgttcgtggcaccgtgtgactcagtctcccttcctggacgctagcggtcacttgccatttctgagcgcacgtgaagcctctgtggtttctagaagtgtcggtgctgaacgcacgcccgtttagccttcctcacccgtcagtctcaattacaaaacagagtgcttgagaacgatggaaagctgtaattccatcccactgtataacccctcaccgcccacaagctgccttcgtggccgcggggaccccccccaccccgcttcttgttatctctctgcgcctgtttccctctatcttcagtggacgcaccgtgatttgggggttctgggaactgcttttttataggagcgcgaggagctgtttttccgggccctctgtctctgccacaccgtccaggtgaaagacgatgacagcgtagacggccccaggaaatcgccggacggggggaaatcctgtgtgtacatctcatcctcgcccgacgaggtggcgctggtcgaaggtgtccagaggtacgtcgcgggccaagggtctgcctgggtttcctgatgtgactcagcccctccccagccccagtcagggatttgcacctagaggcgtcctcagccccaccctgtgccctccacactgagctgtgctgcctttgcacccagcttctctggacccccgtccctgtatgagcccctcccaccgtgataagcagcgtctggtccccggcgcgtgagtcttcatctctgactttgcgtgggtggcttttcctcctgaggtctgcagtaagttagaggtcattccaaataaccacaggcttcaaaatacggaaacaatcattcttttaacacaaatctccctcctgcatctcagaaaactgaagcccagaggcccagcggccttcccagagccacagcctgggccggacagagcagagctggtgcgggacctctcaccgcccaccctttaagcaaacgcttggaaaaatactttaaacattccagatacatggcataatttcaactcaggggagccattttcaaatccatccagctcatgacttctgtattactgaacctcccctccccaaaagtgccttcagggactgagtatggtgagaatcatgttcgcgcttctcacctcattacagccatgtttttgtcgctgctaaactaatgtgttttctccatgcaacttgagtagcagcacagatacgtcaacagtatcaccggggcccttcgttccatgcgtaaacccacacatgcgtaggtgaggcttcttggagctgggtttctctcttcttgaaacacaagtgcccaggaatgccactgccttcatcacaggtgttagaagtcagggcaggctaccccgcccacctttgagactcctccctgccctgaagcttttcctccagccgctgctcccacctgggctggccagaggcctccactgccatccccctggtgccgcgaagcacgtctgtctcccgggtcctctgctggcctctcgcatcccaaagccatgctctgtctctgccgtcccagtggctcccacaaggccctgaaggtcgctgacccccaggcgtgcaggaggaggcattgtatagatgggtgcacccacgtgctggctgaaggcctgcgctggaccttcgttccccgtcagtgactcaagggccttggtgtgggggtaacagcctctcagggtccctctccctctggcatcgtgttctccgctcaacaacaacaaagtccacgaatcaatgagcaaaagtgtcatcgaagcaaggattgcaggccatgtgcctgccatgctcttctggagaacaatactgacaagaatgtgcctcactgctgtgtgccaaggagggttgggttgggtagaaattctcttgctcttggaagattttttgagatggtgaataagttcattatgataatttcctaactttataatgcagtttataatctctgtttaactgaaagtatttcttttttgaaaagaacgctttaccaaaatataaagcaaatactctatgaaagaggaacatcagaatctcagattcaccccgaggtttcccttctcattgcagacttggctttacctacctaaggctgaaggacaattacatggagatattaaacagggagaaccacatcgaaaggtatgtgcagacctcaccctcagatgtgaaaggactaacgaataaagagtgttctttataaggttctgcgtttgagggaaaagacaagttctctatgttctcccacaattcgcttcctctccttcccagtgacaccccaggaatgtcaccagaatgttctggagaagtgctggacacttagagaagggcttgggtgcagccacagcgctgcttcccctggatggtttttcttggagatgtaaattggagttcagtgaacaaaagttcactgtcaaatatgttttgggttaagccacctgaagtcaggttttgctgcaggccgcgttctgacctctccaggcccctttgcctccacgaggggagtgagcagctgcccccggtgtggccatgagtcccgcagggaggaaccctggctcacgtgctgggagcacagcgtcgtgtcgaaaacagtttgcacagttacgcttttcagtcaccagtttgatgttggattgttttacttttcatatctttaaaactcttcccattttttagggactgtctctgtcccaaattgcttgtccctgagataagtgacccatcttgagatctgactcaggagagggggtggtggcttatcaacaagcacgaatgtgcggtcatggttccggcaaagacacaagatctggtggtgatggcctcaaaacacgtggattttaaaatttcattcttagggaaaataaactccccagtggaagagaaaggacaaatcccttgattcggcggggctcctgggccctccgctggcaccagctgcaccctctccacagcaccctgggcttcccgggggccgcaactcactgccgttgaggctccgggtttgcagccgtggaggtagtgaggtcgtggcctagatgagagcccccatcagggctctgccaagggacccctggctctgagctgggctggcactgcggccagagcccctccgcagcttcccactgagtccaaggccctgaggaggctgaggggcagcagcgggggctgccaaacacttccgatgctccagacgccacacaggttttctgagtcttccggtaacaggacagcaccagccaaaacgctttttcctttggttttgatctcttagggtaacgccagttcattgacaaggatccaatctctgacacaactttgagtctctgttcagcggtgtttagggagggagtcggtgcgtagggaacgcagcctgcttggcagaatctgagcctatgccctgggtaggatggggacgtagtgaggagccggtgccacagggcccagactctgccccactgggtacacctgctgcgtccttcaaatccaggcctctcagggcatccatgggaggacacccctcacccagcagccctctgtgtgtcccctgaggaagggccagggctgccccagccattctgctgtggagagctccacagttaccagatggaatcacgtgagcacccgtgtggacggtgtgaccttctgcatttctctttcaggtttgaattgctggaaattttgagttttgactcagtcagaaggagaatgagtgtaattgtaaaatctgctacaggtaaaatttctttttcttttgatttattaagttatacgtggtggttgtgttttattctgatgactaaattctacaggagctttaaggatttagggtttaagaatgatttattctttttttaaaaactatagacaaatcctctcaaaatactaattttttatttttaaaaagtgcaacatttctggaatgctgaggaaggagtcctgggctaaacatccggcacccttgctctgtccatcttttagtgtcgagttggggccactttactgttgaaaattgcttaattccatttgtgaaagttcctctgcccatccctatcccccacccgcttttctccatgcagagctaaatgacataaaatgtttttaaataaccattttcaaggaaaaggtaatgtgggtttgcaaatgtatctataataatgttcaaagttgcaaagtgagctttgttgattggcagttgccgtaacagtgtgtctgtgagaacagcacactcggttcgtgctccggaatgctgggatgagcagtggcggggcacagtcagagccctgtggccgccatgatgttttggtgacccacacggttgggcactctcctgatcctcccactctgacctgtggctgcccctgtccctgacgattgcctctgcagtccaggtggatgcatctgtggtcccctgacctccctgcgaggagctctcccaggcactttgcatcccccaagcacaggtggacgacctcgtctccccccaccctcagcaggtcacgacacatgccacaggtcactcaacaccgcagcccctcaggctcccgcccacagtgctgaggcttgaacgtgcaggcgcccctggctgtttgccctggacaggcagggcccgtgggctccgtctgcagaggccacccctttgcatggccatcacttcctaagagctcccaccgccccctctgaggctctcactcaccttcatcaccaggttgtcctcaagtgtccccagagggcactgcccacagcccccacagtggccttgttccccgcttcctgccgtgggctttcccataggaagggcctttcacccatctgtcctttccacggacggctcaggaagcctctcccggacctcagccccatagcagcgtgcaggacattgctctatggtggagctgtctgtccgtctgcagccactggctgcctgcacgcatcccgaacgcagaaccgatgctcttctcagcaacacgctgacgtcacgccaccctccgccgagtgctcccaaatcctgtgccgttcagagccctccacgcagcgtcagagcagggcttcattaagagctgtgggatctcactcttcattgtttcctaaaaccagacactcccaggctgcatttagctctttggaaagatgcctggcaaacaaccaaacagccactccccggaaccagacaggctggagagcttcatgccagcattttcctaagatgtgccgagtttaattttaacacagtagacagagcagggccatcatcagtgccgtcgggcacccttcggatcaggaccatggtgcctcacttcctaagaccccgaaggagctgtagggggaggcagtgtgactctcggtgacgccctgtgagtcatagcggctctggggtgggcagcagcctcaggagggaggagggtgccatggctgctctggggggctgccgcctgccttcgctggttccttagacacagtcccactgtgtcacacagcatcacctctgagacacgccatcaaatgtgggatgaatccaggctccacagtgagatgtctactgatggtcataggatgaggaacaatctgtgtgtgaatgttgccaggactcccacgaagagcttttgccagccagaccgtgggatcagcaggacagggtctgagaacaggttcagatgcgcgagacttctgtgtgtcagaacccttccccccggctcggatgaggcgcagtcctgagagtctcagccactcggagttatctgggataaacgcatcctgggtgggaagttcctggtccatcccgtcacgtggttttccccgtagcagtcgaatctagctgttgagccatggctggaacatgctgcccgtgacctgcggggctgactcacgtggttttccccgtagcagtcgaatctagctgttgagccgtggctggaacatgctgcccgtgacctgcggggctgaccacggtgcccaagaaggcaagcatcagccaccccggagccgcccctgccgcgcactcaccccggagctggccctgccacacgctcacaaggggtttttgctgcatcctgaatgcccaagacctcagggcattgtgggctatgccgtggaatctttgtaaataacttctgttactatcaaaaggctgaagagccgctggatcactcgaagaatccgggttggaggcatttgtgccatgagaatatccctatccgcactgggacgcctgtggacctcctagggcctctccaaggaactgagagcttgcaggagagacggccctgccatctgaagccagccactcatcagttacttttaagagaagtttgaatatgtaattaagcaaggtgttctgtaagtagtagtcatccccggagaggttcactaattgcactggagttctccctgctgggcggggagaccctgcagccagctcacagctcgtgtttcctcctgggctcagccctgtagggggttgcggctgtcagagccggatctcactgttttggggctgagcagccccaacaggggcctcccatgatgtccgcaggacccttttttatatgtctgtacctcagtcatgtgtgctttcctgggattctccacggtggaattttgaggaaggacttcggaagtcacaggccactcggctgcatcaggccttccctttcaaaggcagatgtgaaatctctcttttgggggatcctgcggatgcttactgcacccaaggtattatgtacgcagtacacagaagaccgactcgaaagaagaaaaggagagtacataagcatattcatctatgaaaaagaaaagcaagcagaaaagatgaaagagaaggaaagtcctaacagtgcaccctcctggagctcctccaggagctgcttccttgatgccctttttccagccatttcggggacatttgctgtcacgcctggctttccatgtccttgagctggtctgtgagacacagtgaaagaccccccaccatgggctcaaactgtggttctatagccctttctcttctccaaatggcagtaagcccttcttggtcccagaggggacagccaccaaccacggctgcacctgcgacacaacccagctgtcttggggacaggatcctgtgtgttcggttatgtcacctgtgtgtgcacggtcttcagttgctcattgtagattaacttttgctctgtcctctgggtttttttattccaaggctgttcctcaccaagtcttcaggctgaaggtgtcctgtgtcttacagtggaattcacaagctgagacagtgggaaagttaagccattcacatgctcttggcatgagttgtgagccatgaaacatgaattttctagtaaaaaatgtgctgttgttcaagaatgcatcattatgtcatttggaccacagttctcattctgaactgtatctgatgaaacaacagcgttggctggaaaccatgggagtcgggaaacggctctgacatcgattgggtagtttaacccccgggccctgcttttctatgctaagcaactgagactctgtggtcacacctctgcagttctgcagagatcctccagggtccaactcccagcctcagcctgctcactcccgtgccctccagcctcagcctccccactctcccgtgccctccagcctcagcctccccactctcccatcccccccagcctcagcctccccactctcccgtgccgtccagcctcagcctccccactctcccgtgccctccagcctcagcctccccactctcccgtgccctccagcctcagcctccccactctcccgtgccctccagcctcagcctccccactctcccgtgccctccagactcagcctccccactctcccgtgccttccagcctcagcctccccattctctcatcccccctgcctcagcctccttactctcctgtcccctccagcctcagcctccccattctctcatccccccccagcctcagcctccctactctcctgtcccctccagcctcagcctccccactttctcatccccccccagcctcagcctccctactctcctgtcccctccagcctcagcctccgtcctcccccatgccctccagcctttgctcggcactggtttgctgcatgtattggcaacacctgtgtcaccaggtgccatcctctctggctgcaggttggcagccacctcagccacatgagcgtcaagtgtagccatgttcccacagcttccctgttggtgtctcaggagttagtgcttcctggcatccaggaaggaaggcaaggcggacccctgttcctactcctgagtcctcgtccaagctccaggccttggatccgggtcgtcagcccgagagcgtcccctccccatgtccctcccaccaccaccctggggaccactgcctgcccactctggggccctctggatttggtccccagtagacttcccgagggccctcagtgtctgggggtctcagggctctgccccgccaggagctgggcatggagcttcctacgcgtgccgctcaggctgctgtggtgtttctcccaccctgccgtcaccgcgccgtagcacggcgtttccctgcacccaggcacaaaccagccgcctggcagagtgccacgtggcttcgcggaccagggatgcttcaggtgcagagggagctctgtgtgtcgggagcacctgcgcccaggcacaaaccagccgcctggcagagtgccacgtggcttcgcggaccacggatgcttcaggtgcagagggggctctgtgtgtcgggagcacctgcgcccaggcacaaaccagccgcctggcagagtgccacgtggcttcgcggaccagggatgcttcaggtgtagagggggctctgtgtgtcgggagcacctgcgcccaggcacaaaccagccgcctggcagagtgccacgtggcttcgccgtccagggatgcttcaggtgcagagggggctctgtgtgtcgggagcacctgcgcccaggcacaaaccagccgcctggcagagtgccacgtggcttggtggaccagggatacttcaggtgcagagggggctctgtgtgtcgggagcacctgcgcccaggcacaaactagccacctggcagagtgccacgtggcttcgccgtccagggatgcttcaggtgcagagggggctctgtgtgtcaggagcaggtgacatcacagcagaactgtcgtggcctttgctgtatgctgcagtgcctggaagagaaactcgctttatctgaggcctgagaagcccacgttcacagcacaagtatgtccacagcgatcacagtgttactggacgtgtgggaaaaaatgacgcaaacgtttcccctgactcttccaagttcagaggtggcccggctgccttgctctgcatgaggacagatgactctccgaaggggatttgtgttcaccttccagcatttcagaaaccaggaccccctttgggtcaccccaacgcccgtcccgagggcattttgtcccctttcgtgtctttcccagagaaaaaacagagtcccggagccaagttcttttcctcgttcctgcctctcctgtggaatttctagggtgtaggaataaaacgaggctttggaggttatctgtgggtttattttttcctgactgtagcgtgttaactggtccattaaaatctttaaaaagctttccacactgctatccctgttttttgttttttaataatggcataattttaaaaaataatctagtcttccccatattgtgattaaactcctcatttttctcattttgtaggagaaatttatctgttttgcaaaggagcagattcttcgatattcccccgagtgatagaaggcaaagttgaccagatccgagccagagtggagcgtaacgcagtggtgagagccgggctggggagggcctcgtggcggtcagctcccctgctgtcaggaaggaattccatgttccacaagttcctggctgggaatggcgtattgtattccttggggaatgtttagaaatcagctgggccagaggcagacagacaggcagcctcagccggcaccgaccccagggggcctccgatacccagccaggcacaggctgtccagccaggcacaggccatctcctccccagccttgcacagggttttattttcgggtgggtgccaggttggttgattgatgttttggggagtcagaattagcacgtttgtggttattgtattggagcaaaaagtctttgtgttgacgtttctagtgatttgcttcaaaacaaatcagcactttcgttttctgttgtgacatcacctgtttgggtttctttccccatctgggtcttaagcttgtatgataaggtttctttccaccacttgttgtatagcaccgcccagcagcccgcacacctgagcctcccactccgtgggtccggctttctgtctttggggctgctgcggtagggggccggcctgagtgtctctcacagcagggcctcccctccccgtcagacgcgctaaagccgggcaacacgtggctggggtggacacgctccctcctgtcagacaccttaactccgggtgatgcgtggctgggtggacatgctccctcctgtgagaggtcctaacgccgagcgacgcatggttgggtggacgtgctctctcccgtcagatgtcctaacgccgagtgacgcacggctgagtgcacatgctccctcctgtgagatgccctaaagctacactgtgcgtggctggggtggacgcactccctcctgtcagacgtcctaaagctgggtgacgcatggccgggtgggcgcgttccctcccatcagatgccctaacgttgggtgatgcgtggctgggtggacgcgctccctctgctccccacgtggctgctttgtcccacggtgtctgcacccttctcccgacaccaccctggggtcttctccctcactccagcccagggcagcacctcctctcacaccgaccttatcatcttttcatgaaaaagaaacagtaactgacaggctctcctcccagaggtccaaaatgacgctggccagagtggctacgcactggaaaacaagacttccaaggctggctctgcaccaaggaaggctgaaccgagagaaccttggactagaggtcgtggtactcagcgctcccttcactgaccatttaaatgtaaagcaatgtttgtcctcgctgtcagtcgcaacacttgattactgtagatgtcagagcattaagaattcctgccgatggacaggagccctttcgctcgcgagcccgtgcgtgcagcagccagagcctgtgaacttcgtggaatgctgtcgacgtgcggatcatcatctttacgttgctattaaaacagctcctggcactacaaagtagctgcgttggagccaacaggaatccataaatcagcagcaggttaaagattgttgaacttctctgtgagggatctggaaaatacatcactgacttccaccagccacagagctgcagggtgggagccgagcgggttcctctgagcagcacaagcgtcctgcgcttcgacacacaatgagcctcagtacaggggcgtgtgggggctcctgagggggcagctccatctgcagctcgctttccaatagcgcgaggctgtgctttgctgtgacgtggtcgccgtgccatgctgagcacacgatggctacaggtcacaggtgactggtcctccatggagggtcttcatggcctgagtaccaaatatcttccacctgctggatccccactgctgctgcccaggagagtaggcgcatggattatgtgaattgtgatgattgtaaagtccacttgctgcttgtttcagaaagtcttcttgagatgtaattgccatacattgatctatacatatttaaaatgcgagagcagcaagggcattgacacacgaacacacaggtggaggctttgcctgctgggaaggggacgcatccctcaccctagagactgtctcgcgccctcatactcccatccctgccaactcccactcgctggagaccaccgctccactcgccgtcactgcagattcgtgcccaccttctggagcttcctatcagcagaatcacaaaaggcggctgttgtatccggcgtctttcactcccataactgctgagactcggccgtgtgggcccgttcatttctgtcgtgaggaacagcagcactcgttcagttgccgagcactagcggtactagttcagcggccgctagtccaagtacctctagcggtactagtccaagtgccgggcactagcagtactaaccagtccagttgccgggtgttagtggtactaaccagtccagttgccgggtgttagtggtactaaccagtccagttgccgggcactaacagtactaatcagtccagttgccgactgctagcggtactagtccagttactgggcactagccatactaaccagtccagttgccgggcactagcagtactagtccaagtgccaggtatcagtggtactaatcagtccagttgccagccgctagcagtactagtccagttaccgggcactagccatactaaccagtccagttactgggcactggtggtacagaccagtccagttgccagccactagcggtactagtactagtccaagtgccgggcagtagcagtactaaccagtccagttgccaggcgctagcagtactaaccagtccagtttccaggcactagtgatactaaccagtccagttgccgggcactagcagtactaaccaatccagttgccagcactagcggtactattcagtccagttgccaggcactagtggttctaaccagtccagttgccggcactatcggtactaaccagtccagttgccagcactagcggtactattcagtccagttgccagcactagcggtactattcagtccagttgccaggcactagtggttctaaccagtccagttgccagcactagcggtactattcagtccagttgccaggcactagtggttctaaccagtccagttgccggcactagcggtactaaccagtccagttgctggcactagcggtactaaccagtccagttgccaggcactagtggttctaaccagtccagttaccaggcactagcggtactaaccagtccagttgccagcactagcggtactattcagtccagttaccaggcactagcggtactaaccagtccagttgctggcactagcggtactaaccagtccagttaccaggcactagcggtactaaccagtccagttgccggcactagcggtactaaccagtccagtttccaggcactagtgatactaaccagtccagttgccggcactagcagtactaaccagtccagttgccggcactagcagcactcgttcatttgccgggcactcgcagtgctagttctttctacggatggaccagtttcttgattcttccgcctgttggcagacattgggttgtttccagttggggctgttttggaagcagctgctgcgggccgcctgctgtgcgtgtctggggctgagccgatgtgtccttttctcctggggaccctcctgtcagagcgtcttcatttctctttccacagcttcccttttctggctgcttttgaggtgtttcgtgatgggatgccttggtggagtgatgctgtgtttctttgctcagccgtgttgagcatctcggatctgcggcgtttcatcaagtttaacatttttcagcaattattctacagatatttttcttccttgctccctttcagcagttccaggacccatgtactcaactgccggatgttgtctcaccgcttacaaaggcttttccctttaaggttttccacgtttctttagagacggtttctgttgccatgtcacgagtttttcccgtgcagcgtctaacctgtcagcaccccacgcaggacacccctctcctcaaacatcggagttttcatgtctagaaattccgccagcgtggttttgtatcctcatgcccctacttaacatggggcgtgtgtgataacgattgcggtgactgtttaaatcctcctcgctaacggatgggacgtgtgtgataacggtggcagtgactgtttaaatcctcctcgctaactgcacccctgctgccagctctggaccagccacagtgttgcacagtcccctcgtttggggcagggacggtgcccctgcgtgatggtggcctgtggccggatgcctgcctgtgggctttgttggatgctgggtatcgtggtcctcctggagatcttaaatcttgttctggggtgtggctgagttcctgggaacagtctgttcctttcaggccatgccttcgtgatgtccagcagacccacagcagtgcctgccccgggtggtgctccccagactgccaggccctgagcgctgtgcctggtgagtggccatgcctcctggcagcaggctgtcccaccctcctcctaatggcttgttgctggcctccaggagcttcctcacagttgcaggtgcttgaggggccgtccacagcctctggcatccactccatcctaggaactctggtgcttgttcccttgacacccaggtctgccccataactcagggaattcactggctccggctacgttcccctgcccgagcctcggcctggaagctctccgggtagtgagctgggcacttgcagggccccctcggttggcagcattttattttgaaataattacagatttaggagaagttaaaataagtagaaagacagtccagaggggcctgtgtgtccttcgagtccagttaatttctcctttcgctggctgtgcttgctgtcatatcgaagaaactgctatgaaatccaagatgatgaagatttgccaccactgtgtttttttctataagttttctagttttagctcttaaatgtaggagtgtaatccatgtttggctaatttttgcatctttcataaagtgagggtcctactttatttccctgcatgcagttatccagttttcccagcaccatttggtgaagactctcctctcccactgagtgatactgacactcttgctgaaaagcatttgattacggtacctggaggtttatttctgggctctctgttccatcccattttctctatgtctgtctttatcccagttcccgctgttttgattactgtcagtttctagcaggctttgaaaccaggatatgtgagtctttcaactttgttcttctgttataaaatggtttggctattctgaacctcttgagatttaataggaattttaggatgggctttttcatttgtgcagaaaatgccactgggggccaggtacggtggctcatacttgtaattccagcactttgggaggctgaggcataaggatcacttgaggccagaagtttgagaccagcctgggaaacatagcaagaccctgcctctacaaaacatacaaaaggaaaatcagccaggggtggaggcacacatctgtggtcctagctactaggcaggatgagatggaagggtcgcttgagcacagaagtttaaagcagtagtgagccgtgatggcaccactgcatgtttccacgggcaactgagtaagaccctgtctcaaaaaaagaaacggaggaagggcgggagggaagagccattgggatgttgataggatttcatttaatcagtagatcactttgggtagtgttgtcatcttaacaatccatgaacatgggatatctttccatttatttaggtattttataatttctttcagcaaactttggtatttttcagccttgagtcttttacctccttggttaaatttattcataagtattttacttttgttgatgctactgaagtggaatttttttttaatttccttttcatattgttcattggtagtgtatagaaatgccactagttttcgtgtgttgactttgtaccctgtgtctttgctgaattcagttagtggggagcacattcttcatggtcttctggatataggatcatgtcatctgcaaataggccttagaaaggcatcctttctaatgtggaaactttctttttctctttatagcctaatcctctcacttagagcatctaatactctgttgaatagaagtggcaaaagcaggcatccctgtcttgttcctgatcctacggaaaagctttcagtccttcaccatggagggtgatgttagctgtaggtttttcttttcttttttttgagacagagttttgctcttgtcgcccaggctggagtgcaatggcacgatctcggctcactgcaacctctgcctcctgggttcaagccattctcttgcctcagcctcccgagtaactgggattataggcatgcaccaccacgcctggctaatttttgtatttttagtagagatggggtttcaccacgttggccagtctggtcttgaattcctgacctcaggtgatctgcccacctcagcctcccaaagtgctgggattacaggcgtgagccatcatgccttgctggttttttcacttaagtggtttttaccacgttgaggaggtttcttctctccccagtttattaagtggttttatcaccaaaaggtgctggttttttttcagatgccttttctgcatcagttgagatgatcatgtgggatttatgtcatgtattgcattgactttcatatgttgactcacttttgcattcctggaataaaccccacttggtcgtggtgtatgatcctctatgtgccattggattcagtttgctagtattttgttgagcatatttgcatctatatttctaagggatattgttctacagttttcttgtagggtatttgtctggctttgttttatgtgctgtgtccagggttttcgtagtacttagcaggaggaatagagaaaagtatttctgttctgtgttaccacaagagaaagtccctgattgacttttaaaagcagcgacatatttatttccaaaagcttctgcttatcactcacagcaacctaagttctgggaccattttgggttattatcctgtaaaaccattttcttgttatgtaatttttctggtttcagactgaagctatatatcttgtatgttttattgcctcttaggaaaagtcagagaattcattctgcaattcgcatttatgtctccaatctgtaacttgatcaacaggtgcacaaaagatctaatttcaaccacttatttattcagcaaacgttgttgagttttggctgtgtgccagggattcagtggtgaagtcagacacagtgcccacagccagagaacccagtgcctaacaatagaggcaaacccgtgagcagaaagctgcaaggtcgtgtgctcagcaggaggtgaggctggggtggctgagcagcgtctgttcagtgctactttcctctgagacgggtccactggcttctcacttattcttgaccaggagacaatatctggaggatgggaaggaaggagttccagaatgttcctggagaacaggactcaggcacacatagaccctgtcttgtgttctgacttcttcaactccccctttcccaacttctggcttttgagagctcaagggccatgacagccgttgacccagtggcaattctgtccacaccagttaagaggtcggaactagtgataaatatgagccttccctgagagttaggagacgcttcatctcatagaacggaaaacattgtttcaactcttacaaaccagcattctgccggattttaaaatggttatttgggaggattatggttcttttactattatcagtagggctggggctgaaggagcagggaaaacggaaggggaacaccctagatgatcaggtgtgaacctctgtgacggtcgcgctcagcagccttgactgatggaatgaagaggttcatctgtaaaccgccccctgtgtggctgcttcagcctctgcccccattccttgtgtcttgctggtggcggctgcattctctctgtatggtaacatccagaatgatgatcacagtaaggaatttgtgattcttgatttcttttgttcctgtgcaaccaatgattttgataaataacctggcaggtttccttcattgtgaaagaacaacctaccttacaaacttcccacataaaacatgtttactttagaaatatcacttgatattacccataaaattacaaatgattatccttaaaaaaaaaaggttaaatttaactctgcatttgtcaaaataaaggaacaaattttatcttttgatagatgactctgatttctgttacttatttccaggctttctagtctgaaaatgctgtaatccataatgattcttggtatttaatgtagacttaaataattcacttgttgatgacttactcctttcaagatttggttggattataatctttctttctttgtttacttagtactgtaagttttgaaagggttacaattcttgggttagttagtctaatgagagaagggatactgggaaggccgtggagcgtaatatttcagcaagtgacaccttgaattcgtgctaaacgctgcattgtgttctgcaggaggggctccgaactttgtgtgttgcttataaaaggctgatccaagaagaatatgaaggcatttgtaagctgctgcaggctgccaaagtggcccttcaagatcgagagaaaaagttagcagaagcctatgagcaaatagagaaagatcttactctgcttggtgctacagctgttgaggaccggtaaagtaaacgcatgcatcccgtcctgagagacaaactgggatgcaggccgacggcccagggcgtgtgagggcgagtggacgggagggaggccatccgcacagccgacggggcgtgtttgctgctcagggagaggctaggtgtcttgctacaccctggagtcatgtcaggaaggtcatgcctgggggatattttgttgtccatgaagaagatgcctgaaagcacactttcccaggaagtagtgaaaatagctttgtcatatcatattatgaacaggcaagatagaagggctcttacaaattctttcttctttttttttaagggatggcatcttggtgtgttgcccaggctggagtgcagtggcaccatcacaactcactgcagtctaaaactcctaggctcaagctgtcctcccttctcagcctcctgagtagctagaacttcaagcacataccaccatgcctggctaattttttatattttttgtagagataggatctcactatgttgcccaggctagtctcaaattcctggcctcaagcaatcctcccacctcagcctctgaaagtgctggaattgcaggcatgagcagtcatgcctgactgtaattactctttagaatggaatcaacaactaactctgttcctaaacttgttgctagttctttccaaatactggtattacttcttagatcattacatactcaatgtgtttatcattacttgaaaaaacttaatgaagtagaaaattacaaaaactaataatcatcataactggcaaaattaccaattacagattttcaggtacctctaaggcaagagctgccagtgtgccccagctccacaatggggactgaaagttgtttgaggctgaggccactaagaaacagtcgtctggtccacatggtgccttccgagctgagtgaaaggcatggatttcagtggtttgtaggaatggaagaaaaaaaatgccccaattgatgagaatgaagcagaaacttcagaaagttcactgggagtttatctcctagaagaggttaaaggcatcaagtttgaaagtctttaagatccatttcggtccaaaactgaaatccttatcactaaccctgcattttctgagcgtgttgaacaaatgttccttgagttctcgatctgaatggagtattaggcgaagtgggaagttttggtttggtggttttgtgttttgttttgaagtcactctcccctgttcagtccagagtaagtgcacagagcaccgtgtaaagaacgcgacttgcacgtgggaaggcttcagagcgcagggccacggccgccgaaaggctttgctgctgggggctgcgtccttgctctagtggccagtcactcacctgctgtctgtccaggagaagaggggtgtccgtaggatggtgtttgcctggggagcagctgggtcgatctttagaggccttggtggaggagcgtggggatgcctccggcagagcagatgggacagagcccctggggcggggggcaggttgacttgactggaatgggaatgtagaagagtggagagttaatgcctggttggcggggggggatctcagtggctttttcgtgatgatacttgcttataaattatttccttataatctccagtcagcaagtgcgaaacatctctgagcctcagcttccttttgaatcgaattgtagggccaggcccggtggagcacgcttgtaaacagggccaggcccggtggagcacgcttgtaatcctcgcaatttgggaggctgatgcaggaggattgattaaggccaggagtttgagcccagcctgggcaatatagtgagatcccatctcttgaatttttttttaattagtcaagcatggtagcaggcacctgttgtcctagctacttgggaggctgaggagggaggatcgcttgagcccaggagttggaggctgcggtgagctgagatcataccactgtaccctagcctgggcaacataaggcgttctctcgttctcttgctcgctctctttctctctctctatatatatatatatgcacacacacatatgtacatacacacacacacacatatatatatacacatacatacacacacataaaattacaggcttttttttcatctatagaatactatgattgtctgatcttgagacttttagctaggaagttcttcccaaaacctaaccagatccttccagttagaatttaaatccattcctttcatactttctagaagcatggcacgttacttcacacgaaagtagtctgaaacttagaaaaaatggaggccccaaagtgaggcagacatggtttgaccccagatctcccaaggagagggcagtggtctgactgctgtcggaagagccgcttacccccgacaccttctgcagcgtctgcaggctttgggttttccatatgtaaataggtgtggtgctagcgtccttactcgtgacatcatggtaagcatgaaagattgcacataggaagtgtcacacaggcctggcatgtggcaagcccatggcacctgttggccatagaatcactagtgttattctcagtattttatattatttagaggtacctggaccccaagtgggttctaagtgacaaacttagaacagtttatacaaaacaaaagacaatcaatattcctgaccaccttgagtccagatcccatctttccatggttgagacatttttggtggtggttataatttcctgaaaccctccccaggtagtgagtcccacctacacacaaaaccgccaggcttgtcagacgtcagtgacacaagacagccctttacttctcacatgtttgatccatgtttatctctctgctgttaggaagtgtttcgctgtgaaacactagttcagaccttcagaagctgcttcagtacttcgtggtgagatcatgagccacagtgtggagtgttttgattttgaggggctacgatattttgacagctttgcaagtttctgcagttccttatttggattcctgggtcagcactgacttttctctatgctgtgtttggttttgcctccctcaggctgcaggagaaagctgcagacaccatcgaggccctgcagaaggccgggatcaaagtctgggttctcacgggagacaagatggagacggccgcggccacgtgctacgcctgcaagctcttccgcaggaacacgcagctgctggagctgaccaccaagaggatcgaggagcagagcctgcacgacgtcctgttcgagctgagcaagacggtcctgcgccacagcgggagcctgaccagagacaacctgtccgggtaggcagcgcgtccccgcccccacccccacactcccgcaaaaggggcttcagacccagtggccttcacctgcaagtcggggagccgcattgtctctactgggaattcggttctcccctggggcattaatgccagcttcttaggggtcaggtgaacactgggaacaaaacgggctgttttttccagcaattgtgatgtgtctttttcacatatgtgtgtgtatgtgtgtatgttcagtttcacactgccggctaacagatgcaaaaagacatgatggataaaatattttgagtgggataattctcatctgtttctgagacttaggggctctgcttcaggcaccttcaagcatctgctggaggaagtggagatattaataatgcatggttgttcgtctaagacgaagcagtacatgcccaagagttgtttttttcccaagaatattcagtagtttattcagatacattttatcgatgctgtccttactggtgttagatgcattatctgagattacatgttatttgaatcatttcagtttcattcatgtacataaagcgaaagcagctctctaatttacacaaatgttaagttattcataaatagcacagataattccctctacctgatctgcaatctgcagaactccttttagggattggagggttttttttgttgttttttgttttttgtttttgagatggagcctcaatctgtcgcccaggctggagtgcagtgatcttggctcactgtgacctccgcctcccaggttcaaacaattctcctgcctcagcttcccaagtagctgggattaaaagcgctcaccttttaatagagacagggtttcaccatgttggccaggctggttttgaactcctgacctcaggtgatccacccgccttggcctcccaaagtgctgggattacaggtgtgagccaccgcatccagccttcttgtcattttgaaacccagcaaagaggagattatgaccatgttctttccaacttaggtcatccaggcagaaacccaaggacttagctgtaaagactgtgaccaagaaggttgagagtaaagaccaaccaagatcttagaccacaagatgaacgccttcctgttgtttcaaaagtacagggacttaacgagtccacaaagagagtctgcacttgctttacctaaaataggaatgtttcataaaatacactcttaaatgtcgacaaaaggtgttatgttcaatactataaaaattgtattggtaaaacaagaaacactagtttcttaatcccatggatttgtagcatctgtcgatatccaaaaacaatacagtcttctaaaatctatagatttagtgattgagcaatctttctgactcacgtactctaacagactttcagcagatatgcaggactacggtttaattatcgacggagctgcactgtctctgataatgaagcctcgagaagacgggagttccggcaactacagggagctcttcctggaaatctgccggagctgcagcgcggtgctctgctgccgcatggcgcccttgcagaaggctcaggtgctgcccgcccgtcctcgatagctggtggtcagggcgtccaaaacactgaaaaccttccgttaggtctcaccgcctcagattgttaaacaatctagcagggtaccacctgttaaaaatagaagcaaccgtgatagagatttaaaacgcagatcttgttttgcttgtcgggccagcttctgtgattagtgggtgatgaccagtcagatgtatgacccttccagatgcagtggccaggacagctgccctggctgacttctgttaaaaaaaaaaaaaaaagctatctcaatcactcctgagaatctacactaaaggtgtaagggaagggagctgacattactgagcacctagtgtgtgcctcctacagatacgaatgcatttagtctcaaaataaccctctcagacaaatgagggcaccagctttacaaatgggaataatttgccgaaaaggctgcagatgggaaatgccacgaggattcaacttgtcttgtccatcaaactccaaacgtctcacgcggccatgttcttgtgggaaacgcacacctgaagttttttctttaaatagttttgaaagcactatggaatgtattgtaaacatggatgtctttctggtatcaggaagcctagaaaagttctgactttgttataccacattttagatatgataggccaatttctcttgaactgttcatgaataaatccatcattggtcagagcaaaccagtggttaaggtaaaatgcgtctcacacaaactctggaaaccaaggaggtgaaaagttgagcctttgtgcatgtgggtgcactaatctgtcaatttcactaaaaacacagaaccagggtcctcagaatgacgagcctagagcattcacagaccttccatgtgaggaagacggtttgatgtcctcctctccctcacatgcgtaactgcacataaaccttacagaattacttcccaaatggaacagcaactaaggatttgccattcgctcttcatgtattccatagtacttttttaagttctcaactggcttttgaaacatttcatacaaattaacttgtgtttcagtttcctatcttgaaacaagaaggcacccacgtttccccccatctcttcattcttacagcttgaactgttacatttaggcacatagatgggggggaaaagattataaagaaattgactaaaaacttggaaattatttttacataaaattgtcatatttgattttgcacgttacaaatttgaaaattaaaatagcattaggaatagtttatgtttagaaatagatgctttataccaaatagcttgaagtaccttggaatagtgatcttacagaatgcagggttcacatttgcccctgtatatttaaatatattttcccaggatttacacacttttccatatatttaagtagaggaatataacaataactacaagctacttcatatatctcacatctctactgccaaagtttgtctaccagccttttccagctcacgtcattttaatcatacctcatttcttttactttattttgttttgctttcaatatgaaaaaggttttatcctatatggagaaaacagacagaatgtcgtaaattacctctaagtagttaatttttttatttgcctaggctaacttttcatctttgttatttctgcctagtgaatgaataacctgttcagaagtgaaacagagaagataaattccgcatttctttcttttgcagattgttaaattaatcaaattttcaaaagagcacccaatcacgttagcaattggcgatggtgcaaatgatgtcagcatgattctggaagcgcacgtgggcataggtgagcttcgtccttgctgctggcacatcctggtggccaggtcaccccttcgctagacaaaggcccatggcagcacgcaggtgcattcaggacacccccgtcaccaccctcgtgtgtgaccgggaaggctcatgatgatggtttcatccgttcttctccccgtccctgccctgtgtgtggtgtgcagaaagcatttcttcagctccttcacctccgtcttctaggtgtcatcggcaaggaaggccgccaggctgccaggaacagcgactatgcaatcccaaagtttaagcatttgaagaagatgctgcttgttcacgggcatttttattacattaggatctctgagctcgtgcagtacttcttctataaggtaggagggtcgccgctccccctcacggtgttagcaacaggtcacgcacagggtggcacgacccttgtctgagccacttgatgccacaagaggtcattgatctccgaggagcagcaactgtcagaaaggaaggggtgaatctgattgcagtcatctcttgcttagctgtgactttgctttttacagtttccattacctacagtcaacccatgcccaaaaatatcaaacgcaaaattgcagaaataaacagttcctcaggtttaaattgcatgccattccgagcagcgtgatgaagtctcacgccgtcctgctgtctccttcctgggatgtggcttgtccctttgtccggtgtgccgatgctgtgtgtacactacctgcccctcagtcactctgtagctgtcttggtgatgaggttgacagatcacaagaagaagggtgaatatgacacaataatatattttaagaggaggagggagagaccaaattcatgtaactttgattacggtatattattatagttattctatgttttgttgttactctttcactgcacctactttataaattaaactttatcatgggtgtgtatgtatacgaacacacatacccatctagagcatagacagggttcaggaccatccgcagactctgcatccccccagggtctgggaatgtacccctgaggatgaggagggcctgccgtgccgcgggaggagacccccagcccttttctccccccacagaattgagtgtggaaccagtgagaacctttcaggtggaaatgtttgaggaaggattccttattcactgtgcagttcgattctttcccgtttatactgatacctgcattgccttcttgtttctcttggagctgacaaatttcctctatacgttgtctgtcctgagtggccaaaacgtggtcacatgtgcatttcagttgcccctgaaataagagaaagctttctagaacccattagtgctgttctgccgcacgctgggtgcacgtggatccctcctcccatgtggggtgggccacgtcggtaggtggcggctgcctccctctgtcccgtcaccgaactaacagttatgccttgcctttcagaacgtctgcttcatcttccctcagtttttataccagttcttctgtgggttttcacaacaggtcagtcctagggtcttcagggacaggctgtctgagccttcttttccttcccgcagtgggtggctgctgtggggaggggagacttgggaatgagcagcactccccggcaccacgagggagccagggtgcccagcagcaggcgggggtgaagggtcgggcctggggaggggggccacggagctgaggagttgccgtcctggaggccccttgttccatgtcttctgaaactgccgtggccctgagatgcgggccagtgatgatgtggtctcctcagggcccagcagtgctgggctgggcatcctgatgccactgcaagaattaactccaactcgaggtccttgtggacatgggccaccccggtgcctggcacgttaacacatgcaacgtgcccataggggaagaagacagttcccatccgggaggggtgaaggactccccgggcatctgccctagatggacacctccttctgtcacatgtgtgctcagtggttggcgggccagctgccttcatgggaagtgactgcgaccagagtcactgaagcttgaagatggcaatcagaattgcaaatgttttctgtgacttttttccttttttttttttttcttgaagtttgtgctgatagaatgggatgagtcagtgttaggctttttgccagctgtgactttcatcctgaaatcacagttgatatcacagaccctagtttatattgttaagctttgaaaagcgctctggtctttctatgcatttcagaaagaaaatatatttaatcaaaagatccaaaaagtttgtaacaatgcactgaggtgccacttcttgtgactttcctcttacagactttgtacgacaccgcgtatctgaccctctacaacatcagcttcacctccctccccatcctcctgtacagcctcatggagcagcatgttggcattgacgtgctcaagagagacccgaccctgtacaggtaccatcctccaaacagcctctcctgagagcagagagagtaactaggcagcactctggcagttccttccaatagccacctggcagacctcagttgagggccagaagcattcggcatctgctgatattcttgcttgatcaggagcttgtttaaactggaagcaacatagctcaaatggagattcttcaagtcttgctggatggtttatgctgcatttggaacatctgtgtggagccagtttgcactttcctgtgctttctgacagtcctgagggagctggggtacaagcgtcttcctcgttgtgaccctagggaatctgtggcctaagttatcctttaaaaccatgtgtgttccattcagtgagaaaaaacaaaaattaacagctctggtttcagggtgtcttttctccccgttattttttaaaaataatatggaagagatatttttctgctatttcagaaatgccccccaaggtctctggcagattcaatatgttactgttttccatggtcttttaaattgtattagtccattttcatcctgctgtgaagacatacctgagactgggtaatttatgaaggaaggaggtttaatggactcacagttccacatggctggggaggcctcacaatcatggcggaaggcatgaggagcaaaggcacgtcttacatggtggcagacaggagagcgtgtgcaggagaactttcctttataaaaccatcagatatcgtgagacttagtcactattacgagaacaacatgggaaaaaaccacccccatgactcaatcactgcccaccaggtccctcccatgatgcgtggggatcataggtgctacaattcaagacgagatttgggtgaggacacagccaaaccctatcataaattaaaattttatttttcagataattttacatccatatgcagttgtaagaaataatagattctgtgggccctgatcccatgtcccttagtggtgacacgcaagaaactgcagtccagcatcacatccagtgtactgatgttggtgccgttcacccgttcccttattcagatcacccagctttccctgcacttacgtacatgtgtgtacatgacacgtgtatgtgtgtgttcaattctgtgcagtcttctcacatgcgtgtttcctgcatccaccaccatagccaagaccactcacttccctgcctgggattctgcaggaatccgtgcatcggcctcactgccctcatcagaatatttagccattctgtgggatcttgacggcttggatccaaaagtaatcactgtaggtgattaaggacgatgataaaaaggcaaacttctgagttggttgtacatctttaataaatctaaagaaaatgggaataaatctaagaaaatgggagaagatatactgttctagacatgtgtctgaaaggaatcctgcaaattctgtcttattgaacaggcatctttaataaatctaaagaaaatgggaataaatctaagaaaatgggagaagatatactgttctagacatgtgtctgaaaggaatcctgcaaattctgtcttattgaacaggcataaggtgtcacgtcaggcgtaaggtgtcacagcaggcgtaaggcgtcacgtcaggcgtaaggtgtcacagcaggcgtaaggcatcacgtcaggcgtaaggcgtcacgtcaggcgtaaggtgtcacaagctcggtgaacgtcaggggtgtgccttgtgttctctgttcgttgctttcagaagcagcagcatgtggcagcatctctgtgcctatgacgatattgcagtgaatatgagagagaaaatatctgagcaaaagttagccaaggacatgagtgggtagtgaaatgctggttgtgatgaacatgccacatttgtggccagagcacaaacttgatgtttactggccgtgcacatcttatcccatgaagacaacgtccagggatggccaccccagagcctgggggaggtgccgggccctgattctcgaggacacacgctgtgcacctttctcctcaccagggacgtcgccaagaatgccctgctgcgctggcgcgtgttcatctactggacgctcctgggactgtttgacgcactggtgttcttctttggtgcttatttcgtgtttgaaaatacaactgtgacaagcaacgggcaggtcagtacagagctcgattgcgctgacttagctgcttaggaataaagcctcccaagcccatatgatgattttgccaaagcagaattcagtgcagcccatgcagcttcccagcggggtccatcaccacctgcgcagtaattcagtgcaggccacgcagcttcccagcggggtccatcaccacatgtgccgtaattcagtgcagcccgtgcagcttcccagcagggtccatcaccacctgcgcagtaattcagtgcagcccatgcagtttcccagcggggtccatcaccacgtgcacagtaattcagtgcagcccatgcagcttcccagcggggtccatcaccacctgcgcagtaattcagtgcaggccacgcagcttcccagcgggatccatcaccacgtgcacagtaattgagtgcagcccatgcagcttcccagcggggtccatcaccacctgtgcagtagttcagtgcggcccatgcagcttcccagcagggtccatcaccacctgcacagtaattcagcgtagcacatgcagtttcccagcggggtccatcaccacctgcacagtaattcagtgcagcccatgcagcttcccagcggggtccatcaccacctgcacagtaattcagtgcagcccatgcagcttcccagcggggtccatcaccacctgcgcagtaattcagtgcaaaccatgcagcttcccagcggggtccatcaccacctgcgcagtaattcagtgcagcccatgcagcttcccagcggggtccatcaccacctgcgcagtaattcagtgcggcccatgcagcttcccagcggggtccatcaccacctgcgcagtaattcagtgcaggccctgcagcttcccagcggggtccatcaccacctgcgcagtaattcagtgcagcccatgcagcttcccagcggggtccatcaccacgtgcgcaataattcagcatagcacgtgcagcttcccagcgggatccatcaccacatgggcagtaattcagtgcggcccatgcagcttctcagcggggtccatcaccacctgcacagtaattcagtgcagcccatgcagcttcccagcgggatccatcaccacctgcgcagtaattcagtgcaggcctgcgcagcttcccagcggggtccatcaccacctgcgcagtaattcagtgcagcccatgcagcttctcagcagggtccatcaccacctgcacagtaattcagtgcaggccatgcagcttctcagcggggtccatcaccacctgcgcagtaattcagtgcggcccatgcagcttcccagcggggtccatcaccacctgcgcagtaattcagtgcagcacgtgcagcttcccagcggggtccatcaccacctgcgcagtaattcagtgcggcccatgcagcttcccagcggggtccatcaccacgtgcacagtaattcagtgcagcacgtgcagcttctcagcagggtccatcaccacctgcacagtaattcagtgcaggccatgcagcttctcagcggggtccatcaccacctgcgcagtaattcagtgcagcacgtgcagcttcccagcggggtccatcaccacctgcgcagtaattcagtgcagcacgtgcagcttcccagcggggtccatcaccacatgggcagtaattcagtgcggcccatgcagcttcccagcggggtccatcaccacctgcgcagtaattcagtgcggcccatgcagcttcccagcggggtccatcaccacatgggcagtaattcagtgcaggccatgcagcttcccagcggggatcatcaccacgtgcgccataattcagcgtagcgcgtgcagcttcccagcgggatccatcaccacatgggcagtaattcagtgcagcccatgcagcttcccagcggggtccatcaccacatgcacagtaattcagtgcagcccgtgcagcttcccagcggggtccatcaccacctgcgcagtaattcagtgcggcccatgcagcttcccagcggggtccatcaccacctgcacagtaattcagtgcggcccatacagcttcccagcggggtccatcaccacatgggcagtaattcagtgcggcccatgcagcttcccagcggggtccatcaccacctgcgcagtaattcagtgcagcacgtgcagcttcccagcggggtccatcaccacctgcacagtaattcagtgcggcccatgcagcttctcagcggggtccatcaccacctgcgcagtaattcagtgcagcccatgcagcttcccagcgggatccatcaccacctgcgcagtaattcagtgcaggcctgcgcagcttcccagcggggtccatcaccacctgcgcagtaattcagtgcggcccatgcagcttctcagcagggtccatcaccacctgcacagtaattcagtgcagcccgcgcagcttcccagtggggaccatcaccacgtgcgcaataattcagcgtagcacgtgcagcttcccagcgggatccatcaccacatgggcagtaattcagtgcagcccatgcagcttcccagcggggtccatcaccacctgcgcagtaattcagtgcaggcccgcgcagcttcccagcggggtccatcaccacctgcgcagtaattcagtgcagcacgtgcagcttcccagcgggatccatcaccacatgggcagtaattcagtgcggcccatgcagcttcccagcggggtccatcaccacctgcgcagtaattcagtgcagcccgtgcagcttcccagcggggtccatcaccacatgtgcagtaattcagtgcaggccatgcagcttctcagcggggtccatcaccacatgtgcagtaattcagtgcaggccatgcagcttctcagcggggtccatcaccacatgtgcatagctctgggtcactttaaagatcgcattacctgagtgctcagtgttgctgtaaggaaatgtcctgctgaagtttttttttgtttttttgttgttgttgttgagacggagtctcgctctgttgcccaggttggagtgcaatggcgcagtcttggctcactgcaagctccacctcctgggttcacgccattctcctgcctcagcttcccaagtagctgggactacaggcgcccgccaccacgcctggctgactttttgaatttttagtagagacggggttttaccgtgttagccaggatggtctccatctcctgacctcaggtgatctgcccgccttggcctcccgaagtgctgggattacaggcgtgagccaccatgcacggccagcctgctgaggttttcagactttatctctgtaactaacagttcaccatcagtttgttacctagtggtaccattataccatttagacattgcatttttgatgtgggaatgaattccacgttgagcccgtgttagatttccccgagtaccatacttagtcgtcttcctctgtgatgagtagatttgtagttttctagcagacattcactctctggttgtttgcctaacccctgggggtttgttttatttgtatcttgcttttttctttttgccactggcgtcccttcccaccctcagataatgactaccaacacacatatggtaagacaatcatgggtttgtcgtttctctgtgtttttggagtgcattacaaatgaaatatttctcgaaaatattttcaaacgtgaattcctgtgtgctttgtcggtagaaacgctgttagccgctgctgccccacacaccccagagctagctctgtgttagaagggtgtgtgcgcctcctgacgcacatccttgctgtgttccctcggttgccatgtcagggtggcccattgagccagggatgttttccgaattgactggattcatgggagcttccctcgattttaaattaaaggcagcacaggcatgtgtgggaggcccggtggggccctgtgcttcctgagagagccacaccaggcattcggtagatgtcagagaccatccctgcttaaatgcctcaggtatttaactagccgtacaagcagacaccagcgctgacctcggagaaagtccctcttcagcagccccttctgggtgacttctaaacagaaatcggcttcgttccttgtttagcctgacctctctctccctgtgtgtttgtccctcagactgctgggttcaaacacaaaagtcctgctatgtgtcctgtgcaccatttacctgctttagtcgttttcattcctctttactaaacactgctgttatccttcgtcatcacttaaatcagtttttaccaggtctatcttgagaaccaattcaaatattatttcactgttttaaaagctttaagttttctagaacttattctttgtcttcatttattttaattgaataattcctgaatgccaccaggccatgaacgtcatcaaacagagctacctgttgattcttttgtatcttttatgagattttcttccgagttgggcttacgtaagcatctcgcgtagcccttaagagagaactaagaggtagtgtcctgagcactgagattccaggctcctggcggctgccaatggcaatagcaagtcccctttttcccacacttgattttccagttttctctcacaaacaccaccctggttcactacaaccaccctatcagctggacgttcagatcatgtgaaagctgaggaaagagaagttcggacagactagacaccctgtgcggtgtcagctcccgagaggcagggcctgggtcatacccggacgtccggctccagacttcatggtgttgcccagtgcggcctctgggttgctctagttccaaatttcagcgtgaatgtgaacgtgcctcccaagagcccccggagatggacttcaggggcaaggacacgggcgccactgtcctaggagggcagcccggctgtgctcctgaatgaggtgctggcaacgcagtgccaggggcttctctcagccttcctggcagggtctctgcagcgtctccgccttctcggatccctggacccctggcgtgtccgcagtcagctgcacctggtggtcagtgggcactgtggctctgctgccttcctgggatccgaggatttctactagctcctgtttcctggtctcttccggctgtaccctccagcccctggctatgtcctggaaggtaccttgagcccccacggaacccgcgtgcagccccggggtgatgccagcactcagggaacttgggggcagtcctagtggctgacagccctcttggtccttacgtagcaatttggggttggggtgctcacccctgagaatctcccttccaaccaggatactcccaacggggttacagttcagaggccctctgggattgattgttcttgggtgagagctactttgttttaaagacctaaattattctataggaatatctatagatcctgtgtaggattggaggaacaatagaattatggacatctctttcaaaagttcaccaatggagcattttctgcactgacatcgtaagccatagtaacttctcattttgatgccacaaatgagaatgcgaagacaacagttatttgttgaacagcaagacattcctaagtgaacggttaaaagctcggaacgtgctttgatagacgtaggatgcgatgagagcagctgaaacacgagcggtccgcgtatgggccaggtgggaggcagagggatctgcacagggaggggaggcagtggatgccactcatgaccgtgaccttgagaaggcgcaagttatgctggccgtggatgtttttatacatcagagttaaatgggtctggtctgaggactttttgagcagaaagcttctataggaatacccattctcaaaggagggaggaagtgggggcatggggcttagcctgcagtggtggagggtggccagccccagaggcagatctgctgaaggagtgaggctttcgcactggtcaggttcttggctgagatgtgcctgtcacatgaggacagggttccacagaaatcagaaacaggagcttcactggggatggcgttgatgtcacttggaagaaaagggtccctgtgaaaagccctttgaaaaaggagattggtatcccagggatgcctgccacccccagaatctgatggaaataacgaccagcaattgtagtaataaactatccgcacatgttagtccattttcacatggctctgaagagctacctgagacagggtgatttaggaagaaaagaggtttaatcgagccacagttctgcaggctgcataggaagcatcgctggggaggcctcaggaaacttacaatcatggcggaaggcaaaggggaagcaaggcccttctttacaaggctgcaggagagagagagcaaaggggaaaatgctacacactttgaaacaaccagatctcatgagaactcactcgcccaccgtcaacgagatctgcaaggaggacgtccatgattcagtcacctcccaccaggctctccctccaacacacggggattataatttgagatgagatttgggtgaggacacaaagccaaaccacatcatggcagttcacctgggggccccacttcaggccaccaagggaataagagggctttccagagatgcgtttcaggatagctccacagtggactagcttccaaaggacgtggacacaggttagtaatgggtcagcgtttctcaggggccctgaccaaggtgcctgattctggattcacgatagctgtgctttgttcctcacctataaagcttacagctgtggcccatgtgctctgcaggaccaggcatcctgaggcctaactccttatcccagttctgccattaccccctaaacccagggagccccagctgggagcttagaaaggcagtttctcggctcacagcagggagaggggacagtgaggaggccgtgtgagttgactgcagttatcacctgtggcgctgttggtgacacacactgcttcacagggcacccttgagttcatgtcttgctgccatctaactctttcagagttctgtgttgggatggccaaggtgaggcctgggggaggaagaggagagctgggcagcgtcaggggcttttcctccaggcccagctgatgtggttgtctgggtgcaaagccgccctcagctgctgtggaggcaccacttggctgaaagcatcagcttccagttacagcacagcagcctcccgccctccagcaccttgctggccacatgtgcttgtaggctgctgccaagccacagctgttcctagaggcatgatattttcctgccccagaagttaagccacaaagagacggcactttttggtgagtgtgaaacaggcttctcacccgggctctgctgacattggggccagatgtacatcctcgtgggccactgtcgtgtgcactcagcagcccctccacccccccatccaaagctagcagaccccacgccccagaaatgtctccaccacggccaggtgtccctgggggcaaggctgccccagccgagaaccacaagcatgtgtagatctgagtgacactgtaggccaggcatttccaagccagaaggaggaggcccacttctgatcacaatgaggaagtgagggaaaaactgaaggatgtgttgatgggggcccctaagaagcggtgttcactacaaaaggtcctaacacttttttctataatctacaaatgagatgttatcctgttatcccactgaccatgtgggaggactgtagcccacaccctccctcagctaaatcaaggggtatggtgatgggtgtgttgttttggttgaaactgaattctgaagaacagccatttgtattccagctttttaagagacagagtctgtgctctgtcgcccacgttggagtgtagtggcgtgatctctgctcactgcaacctccgcctcccgggctcaagcaattctcctgcctcagcctccctagtggctgagattacaggcaggcgccgctacgcccggctaatgtttgtattcttagtagagacggggtttcaccatgttggccaggctggtctcaaactcttgacctcatgatccgcccacctcggcctcccaaagcgctgggattacaggcatgagccaccacacccggcccgctttttaattctttataaaataaaattccctgcgaggtgcagttcatggaatccgataaactagaaatcgtctgggccacagcgcaggagcgtcccaaaggaaagcaggttctcccgaaacaagtttccagtcgggggttttccccaaggcggggggtggtctgggcagcagccctttctggcctgtgcctcgtgcggtagagaggcgtgctgtcctcacgggtcgggcacgcggtcctcacgggtgtgtctgtgtctgtgctgcgttgccagctggcagctcgtgggtcccactgaccttccctcctccacggccacctgggcaccactgctggcggatctgtggttctggccgcacgcggggcagcctctgtccagccctgtcctgtctgccggcttgtcttctctgtcctgagggaggttccccgagggaagcccccaggcttccccctctgcatgggtgcctggggtgtttcctctgcatttactcgcagaacgttcccgccgctgttcttcaacagcaggcaggagtctgagctgagttcagaagggaacagacacagtctgtgagtttgttcctgaaacccgtggaatgtagctgggtactcaggcaactgtcttttctacgtaaaacacaaaacagaaaaaggaggtttgcgtgtacccgagtttgcattatggatatttaaatgccagctgtgagggagtttttgtgctcagtttgagaccttgggacgtctgttgtggctgagagcattgagcagggccagcgtcaggagcgggcagcaagttgcagataggcaggctctgagcccatcaccaagccacagaactggtggtgggagatgcagccgggaaatgggggcgtcctgccgtgctctggggagttgctgcatcttcttttacgggataataagaaaatatagtgcttatatctttggggtttgaagtgttggcacacaagaaaaatgaggtgtattttctaaaactcttgattgtgaaagagaaaaaaaaatacataaaaacgagatgacttggactattttccccaaacagatatttggaaactggacgtttggaacgctggtattcaccgtgatggtgttcacagttacactaaaggtaagtggtctcgcgctcacgttcctcccccagccacagtgaacccctgcagtgtaggcctcacgcgctctgagctctctgaattataactctgtactgaggctggaagccactctccacccagccttggctggctcctggggcacccctgggcatccttgtcctgctgtttagacaagtaatgcacagccactcagcacacccggccaccccatgtgcaaaccccagagctacaccggaggtaacctcgggagcaagctgcttctttgtgaaagaattcaggctagaattgttttcagtggcaagtagccctccccccagcgccatcaaaatacactttaattgaaacaaattaatgtattttgaaaaatttcactctttaaagttcagtgaaattatatacagaatatatcattatgaaatctcaaaacctatcagactgagtcttaaaaagtgataccaaaacattcctaaggtgattttcttagatagtgatgtaaacaacacctgactctaaagtaactttctggccaggcatagtggctcacacctgtagttccaacactttgggaggccaaggtggatggatcacctgaggtcagcagttcgagaccagcctggccaacatggcaaaaccccatctttactaaaaacacaaaaagtagccgggcatggtggcacgcgcctgtaatcccagctacttgggaggctgaggcacgagaatcgcttgaacccgggaggtggaggttgcagtgagccaagatcgcaccactgcactccagcctgggcgacagagcgagactgtctcaaaaaaattttaagaagtaactttcttcagtagagacataaagaacaccttaatctgaatgactttcttcggtgacgatataaacaacaccttggtctgtggcccgcatgctgccatctgggaaatacatccatggctcccttacctaggacccagggctgtggcgtccccacattcttcctctccactcacactgtgaggtgtggctttgtcttcctgagcagtgtgaggtgtggctttgtcttcctgagcagtgtgagctgtggctttgtctcccgaacggtgtgaggtgtggctttgtcttcctgagcggtgtgaggtgtggctttgtcttcctgagcggtgtgaggtgtggctttgtcttcctgagcggtgtgaggtgtggctttgtcttcctgagcggtgtgaggtgtggctttgtcttctggagcggtgtgaggtgtggctttgtcttcctgagtggtgtgaggtgtggctttgtctccttaatggtgtgaggtgtggctttgtcttcctgaacggtgtgaggtgtggctttgtcttcctgagtggtgtgaggtgtggctttgtcttcctgagcggtgtgaggtgtggctttgtcttcctgagtggtgtgaggtgtggctttgtctccttaatggtgtgaggtgtggctttgtcttcctgagcggtgtgaggtgtggctttgtcttcctgaacagtgtgaggtgtggctttgtcttcctgagcggtgtgaggtgtggctttgtcttcctgagcggtgtgaggtgtggctttgtcttcctgagcggtgtgaggtgtggctttgtcttcctgagccgtgttttgcaggcattgagtcgtcattgctgggtcttgcgtttggtttagtttctcgtcaccccccggctctctgtcctgcccatcacgatcattctcactgctcagatgacaccgttaactgcccttttttttttccttttagcttgcattggacacacactactggacttggatcaaccattttgtcatctgggggtcgctgctgttctacgttgtcttttcgcttctctggggaggagtgatctggtaaatatctgataagtagctgataatctgataaatatcatgtggttgttatttttttatcaagggttgaagacacattttccgtgcggccctgttggttggggcaagtgtttgttgaatggctgctgtgtgctgggtgtcgtggggtcctgggatacagtcgggggcaagacaccggggggttcctgctccggtgacttgcatcttccgggggagaaagacgctaactgataacagcttgtgacgagttatacggaggaacagaccaggattccgcaccaggggacccatgtcagattgaaaggccagaggtgacttttcagaaacagtcatttgaaacctggaagaagagcgccatcatcacagcaagtcccagctggtaaccgcctcccacaacgaggcactggccaggcattcgacaggtcctgtctcactccatcctcacgccccgcagcaagatggggcccaggcatggtggggctggaccttgcccgcagcagcctgactcatcggggagcctctggtttgggggagagcagcaggcacgcaggcccgggcgggaggaggtcctccgtgagtgggagccgtggccagcggagaggggcccggaccaggctgcagagcaggcatggtggcctcctggaccgccggccgtgaggatcctggctcgaggctgtcgtggtcagtcgaggcagagcacagcagagttgagtggctcttttaaaaaccccacggtggctgcgtgttgagctggtgagagcgacataggcagggtggtcagtctagagactgtcgctgtaagccaggaaacgacgctgagtggtatgggcccagggccaggtcccagtctcagccccagcgcagcagcctctgccacagccctctgcagacctggggtcagtagccggcctagggaaagccagcaacccactcaggatccctcagggcccctgacctgggcgggactctcagcccaggaagagtccctccggattctctcgttcagccagcggcccctggtggccccaagttgcattacacagtctcagagatgacagcccagcttggagggtgtcaggcaccctgtcagccccagagaaacctgcttagctctagagagcccagcccggctctggagagcccggccattctaacagccctgaaggcgatggctctgtaagaggaagattccatcccaaacctctctgaccagctcctgggctttgtagccaaggagccacagcccgtcagccttggtagaaccacagcctctcacattgtttcctaaaacattgaccccacgtctttgatgtgctgggagctcaccatgtcaccaccgcttggtgatgagaccccatcctcctgcccgccaccagcaccacgtgggtgcccccagccccatcccaggtctgccagcagctgcgtgtccctcccgttacccaccatgccctgcttccgtttccctcctgttgtccacacaccagtttcactgtgcttcctggagctggggccctatctctgtgtctctgccaccatccgtagtgcctgggatgtgaaaggcgatcaggaaacgttaccggaaggcacgtatagacgtggacctgtgggctcgggctggctgcgggtcactggtccctgcatccttgccagcctccctcatggaggctgacgcagacgtctttgaatcatcctctttctggggagagaagtcattgcttgctctgtactgacgaccagtgctcgggacgtccttcccatccgagacttcaagatagaaaaacatccctatttcaatccctttgtgttttgttttttgttttttttttttttgcttctgtgaaactgaacttcagagacttctatgtcccatttgagatgacttcatagaattccttctcccgttcctcttaccccagcattaccgggaggttcagtgttcattttttatatgataaattcagagcaggctccgtggcttgccaagcaactctcactgacaaaagtgtaaactccctgaacagacggcctctccagtgagtagagaggccagccccagggagtacatgcctcaccagcggcttctcttccctgcccctcaggccgttcctcaactaccagaggatgtactacgtgttcatccagatgctgtccagcgggcccgcctggctggccatcgtgctgctggtgaccatcagcctccttcccgacgtcctcaagaaagtcctgtgccggcagctgtggccaacagcaacagagagagtccaggtacggagtgtccccagccggggcgggggtgcctcagggccctggccttaggattgggagatgaccgttttgaaagacagtgtgaaaggtttggatttcatgaaacgtgatcagttcaggtatcactaatgagtgtcctgacggtgcatgatgttaaacatcaggtacatttgcgatgaccgatgtctaattttatgtttcaacctaaacagtcatctgaaatgagacacaaataagagaaaaaagactgatgcaaaaggcaaattatttcatgtaaatggaaaccttttttaaaattaatcattactttaaaaggttgaattacataatttttaaggatggtaaatctggctggaaacggtagcatctgtatcaggaaatgctggtattggtggagctgcttattttacacactcccaagttttaggcacaagcagaattctgggtccagggaagacgtgacgatgccgagtgtccccccaggtgcagggtttggcaggtgtgaggacttagctcccggtcccccatccttttcagcagctggcctctgccttcaagctcaaccctaaatcagaggcagtgaccacgacccacctctgctgctttactgggaagcctgcctgtcctcagagggccgctgcacctgtcacggtccctcaggactctattaacaatgcaagttttcaagtttcatccccgaaatttccaatcactccttgaggtggagccctggactgggcagtgctgaagcccaatggggaaatgaggggtgggggcccctggcagtggctgctcctgcagggtgtgaggctccccaggtgggaggaagacggggagtgagtgggggccggggccccagccctgactcactcacgtagctcagacacccgggggctggctcccagcggtgctgctgtgctgggagggaagacaggttgccctcccttggggggcacagcctcacccaccacccacctccaacaatcagaatgggaccctggcttgagagctttcttgggacattggtgccgatttgaaatgttgaaaccgatgccaccagttcccggcactccctccttcatgcctcctgccacagtttgtaaaatcagagcgagcaaaactcgtggtgaagagactgcctctcaatgtagtgaaaatgtccacacacagctccactgactcgggggccacaggcaggagaaacgcagcagaacgtgccagttggctgcttataagaaggtcccactgaggggcctctgtgcaggaggggagacagtgggagcaggagccggggccctggctgagactccgcggcccccagtgcttcaggggaaactcaccggccccaagcagccactcactgcccagccctgcctgtggcccgagaagcagctgtccagtggtggttttctctaagcacggtccttggttactgagctctttagctgtgcagttccacagcgggcacacgtgttcatgacagggctctgtgcatgggacacgtgttcataaccacatcccatacatggggacgtggcagacacacatgtaacaaggacatcaggcacagaagagacagcagggctgggggtctgaccccgagagagagcaggtgcagcttgggggtgtctgctgggcccctagctgtggccacagtggtgtggcttggggtttgcacgagtctcagccccacctggcccctgggtgcatgtggctgcagaggtgcttggtcaaagatgcctgagcaggcaggagttgaactcggggggttaggagggcctctccccgcaggagtctgggctcttccatgcactgtgcacgcagcctccagagtcggggctgccgagggccacgcccccggatgtgtctgaccacaggccctctgctctgcaactcatctccaggatgggtgggcactttgggaatgccagtgaggaccctccccgtcccaccctttgtttagaagcccctgtattgctgtgggtctctgcgtcccacaagagccccgggaatgcttatgaacagctacacagcgggacctgcagaaggcataaagcagggggtgggaggggctggcgggtcacggtggggggcaccagtgtccgcccagagtgaccagaagaacttgcacgtggtggcgagcctctgactaactcagctctgtctcttgtttctctttccttcccatttccttccgtcttccgaccgctttgcctaaatcctcacaccttgttcacacacccctgtgtgcgtggccgctgacctcgggactaagactaagagccagtgcctttctgtcgagcagtcaaccatctttatgctttctcagacttccagcagcctgagtttctgatggaacaaggtgatgctcctctgccttccacgcacctgggatggtagacacggggcagcagggccatgcccatcaccagagccctgagtccacgtgctctgacgcagcgtccaccaggcgctgggtacagcagcctcacgtcgggaagtcccgccaccacttacaccttctcatgcacagactgatcatgggctgtgctttccatcagtcacagttaaccagggtttctccctcagcgtccgtgcagcctcagaacccacctgtgtgagggttcagacacagctgacagcggagagctggccacatgacccctcacacaggtgtcagaggggttcctaagcaggaaggtgtgagagtttgcaattcacaggtcatccaggctctgagctcacacacccttccctctgcagcctgtagagcgtggatcacaaggcctcctccctcacgcacccacttctgtgcccattctgcagctggaaagactgagggcagctaggataacacggtttgctcaggacccatgcacatttcagaaaaggggagccaggctgagccacacaactggagacaaagaggggacggaagtgtttggtgtcaaatgtttgaccaaattccctttttactgttttttaaatgaaaacctcattgtttttcaaaaaagccttctattaataatttgctttaaaaatgacgaccttggcctttctgggcaatgtagaggcgttcacacgccatttttctgcggtggtgtccatgataagagccgagattgcaggggcctgcacgccgtcctgaagtcgcgttctgtcttttagccgtgtgctcctgcaccaaataccgccttcacgcatgcctccaaatcagtgatgctttgaaaatgcatacttggtattactgttttaccaaatgcagcttagaaaaatgcccaaagcagaaaaaggcttcttttccctttaataacatcatcttctatatattttaaacaggatttttaactgacaaaatggtccttttttaagtccaagcaattaatcagaatcaacagttttctaatttagtgtcatcagaatttgttagattaaattgcagaatttcatctcaccatttctgtacttgaagacatttaggatgaaattattaggaacattttaatgactcataagaggtccttaagaaactgattaaatcatgccaactctgagctaaaaataagcattctaacgattcatgtagtttgttgagagctgatttgcttctgagcatgtacggaagctgagcccggctgcgtagagacagtggcacggagtttctcctgccccctgcgaggccttgggccccggcatgacccccacagacagggccggcgtccacacttgaacagaaagcgcctgcagccagcacatgcccggcgcacacgggaacacgccgtggcgccgagaccacctgcgttctgcaaaactttggaggaataaacgtgtcactagtcctcacgtggggcatatgttacttccagtggatggctttcttttaacctgttcctacggaaaagaaaagcatcacaggcctcagatgtatatgttatatatgtgcgatttgcacatatatgcccgtgctggcatctctgcgtatctgcatgcagttcacttctccgtcactgtccccaggaagggtggcagcctcatcctctgtttcctacttctcctcacctgggcgtttgcccattcagacgtgcaattgtgcaattccaagcccgcagttcttcagctcctgtgcttcccttattccttgaataaggctgggctacaagatctcagtggagttctgtgagcacgctggactcaggaaagtccgtcgcagggccctggtagagcggttactggagctcgctgtctgccgtggaagtgggcgtgtggctgaacgtgtggcttcaggattccagcggtgcctggtagaccttccagccgagggacctcagaccctctgcctcccgcgggtgcatggcccgtccctgagcctgtcgctgtctcagttctgggctcgggcccctcatgggagcggccctgctgggacagtgttttcccaagacgccccaagccctcgccctggcagctccatgacaccccatgcagactccaacaggggcttcgagcctcttcctgctggggtcccacggatggtgcaggcagaggcccgagcactcctggtggccccgtgtggcccacgtcgctcagtatctttcctcgccttgcagaggggtgtgaagcacaaggctccagtccaggccgcacagagcagcgatgggcccctcctgaaggacctcctacggcggccaaggcgcagttagctccacgctaggtaactgtgcggctgctggacgccgcccgtgtgctgtgactgtcagacccgtttttcctccaaagttgtgctgtgctgtgctgtctttgataacaaaggttcacggtgagaaagagcagccctctttacacacacatgcatttgctgtcccaggtaagtaacacgcctgagggcaagctgaccacacatggaacatgctgtgcacacacacgtgtgcacactcaccccacacgcacggcacacagcctgaccagacccagcatcgtcagacacaggctcacgatcctggtctttcgggggacacagcttcacttaaaaggcccatcaggaaggaccgtgctttgaaatcaaacgtggttattgcatggtttgtgtggaactggggcccaggcaggtgtgagtgcaggtcttctgtgtgccagccggagcacatagcttgtcgcctctccaacagacatggaggccatgaagacatctgctcctgccagcatccgccgctgccccctggtctaaaagtgggctgacctggggacggcccctcatcagacagatgcgtgctgccggcctcctgccgctccccttgctggtcagacccacagggcccgtgcacatccggggccccagtgggctgtcagaagccatgcaggccccatccgtatggtgacatcctaggcaacatgtcaaggggatgcaagctgggcacgtccagtactaaatcaacccggtccctgtggggtggggcctgccttccctggggcagtgagttcgccttttgttcaagggtctctgggtaccggtatggcgttcgagctcactgcacaggaagccagctacagggaggaagctcgtaggtttcccgtccatggcctgtatccctggggcccctgggttcttccctgggatggtgggacagggggacggtcactctgttggtactgaaaaggagaggccctcattcctagacagagacccctcgcctccatatggcttctctggtggggtggatcccgcccggcctgccctcaggacgagggtgtgtcctgagttgagtctagcagttcctgcaggaggcgatggtagtgagtgcatcccagagtggctcaggtcaccccaggcagccccgtgggtatccctgagactgaccatgtgtctcgttctctcagcagaatgggtgcgcacagcctcgggaccgcgactcagaattcacccctcttgcctctctgcagagcccaggctaccagagcacctgtccctcggccgcctggtacagctcccactctcagcaggtgacactcgcggcctggaaggagaaggtgtccacggagcccccacccatcctcggcggttcccatcaccactgcagttccatcccaagtcacagctgccctaggtcccgtgtgggaatgctcgtgtgatggatggtcctaagcctgtggagactgtgcacgtgcctcttcctggcccccagcaggcaaggaggggggtcacaggccttgccctcgagcatggcaccctggccgcctggacccagcactgtggttgttgagccacaccagtggcctctgggcattcggctcaacgcaggagggacattctgctggcccaccctgcgcgctgtcatgcagaggccattcccccaggcctgtgtcttcacccacctgccatcattggcctttgctgtcactgggagagaagagccgtccagggacccatggtggcccacatgtggatgccacatgctgctgtttcctgcttgcccggccaccacccatgccctccatagggtgaggtggagccatggtggtgcgtcctttactcaacaaccctccaatccggatgctgtgggaagggccgggtcactcggataccatcatccctgcggatgcaccgccgtaccctgctcatctgggagtggtttccctgcggttacgtccaagcccgcctgccctgtgtgttggggctggctgagtttcggtctccccatcaccggccgcctcgtggagaaggcagtgccacgtgggaggacaaggccacgccggcagcttccagccctgccgcagaagtgccaggatgtccatcagccactcgccagggcacggagccgtcagtccactgttacgggagaatgttgatttcgcgggtgcgagggccgggagacagatacttggctgtgatgagcagacatcctctgtccccgtggaggggtcaacaccaaggtggtgttcgtgcaccagaacctgtctcgggctgacgggggtggcacacaggacacgggtggatcccaacaggcagcaccgcacctctgcccgcctcccgcactgcagctccgcccgccgggctctgcgtccccacgtcccctcgtcccatccccacgtcccctcatcccgtcacctcgtccccacatccccttgccccgtcacctcgtcctcatgtccccttgtcctgtcacctcgtccccacgtcccctcgtctcctcatccccacgtcctctcgtccccttgtcccgtccccacataccctcgtccccatgtccccacgcagggctctccttcgtcttaggatctgtccagcgctgctctgggtgggttagcaaccccagggctgctgtgataggaagtccctgttgttctccgtactggcatttctatttctagaaataatatttgacatagccttaatggtccttaaagaagacatttcagtgtgagattcagacttcagacgctgaaactgctgcctttcaggaaagcaccaccaacgctggaggaggagccggccctcacgcccgccccgcgccacgctgtggaacggggctccggcaagtgaaacccagagggtgtttccgaggtgctcgacagtaggtatttttggaagctcagatttcaccatttgattgtataatcttttacctataaaatatttatttgaagtagagggtaaatcagcggtaagaacagtgaacacagtggttgggataaaataaggtgacaaacatcacaccaaagatgagggtagcgagcaactggcttgagcagacagaacggggaagactccactctgtcccgaggggccagccgcaggcgtccccagggccaccctgccctgaggtccttgtgtggccgccctggcttggcagccctgcccacgctgcccccgcaaacaatggtgtgtgcgtttttacagccctttttaggaacccaatatgggcataaatgtaacacctgtagcgggggcagattctctgtatgttcagttaacaaattatttgtaatgtatttttttagaaatcttaaaattgcctttgcactgaagtattttcatagctgtttatatctcttttattcatttatttaacatactgtctaattttaaaaataggtttttaaagctttcatttttaagtttatgaaattttggccactttacatttagattctggtgagagttttgactgaatgttccaatctctgatgaatgcgaattttcagatttgattttattctctacacacacctcttcttttcttggtatttctggtggcagtgattagttgaacagcacatttaaggcacgataatttgctacactttttctttacaatttgttgcaatttcatctgctttctatgtttcattgttaattgccatccttcagccttaaaaatagaagattctcacgtgaaggtttagtaagttgggtcccagctctgcctgtgtggagatagtcaccatgtacctctgacaacaagttttagtgtgaaagtcactaaacttttacacactcccaaacgtctttttaaaaattgcttgggaaattattaaatgaatgtgcctgatgatttgaaatagacaaggggcacgagataaaaaagaaaaggatgagaagatcctcagtgaatgacgttgcagggtcttcatgcaattttccacctcgcagtagttagtatttacttgccttaaactaactttgaagcaagtaatgtcaactttgagcactttgttgagttttgaaaaatcttatttgttgctgcacaggttaataaattatcaatttgtaattcagcatgttggtcagagacacggtcactgattcacacccagtccctgccacagaccgtctcagacacgcacagtgggcctgctgcatgattcacacccagtccctgccacagaccgtctcagacacgcacagtgggcctgctgcatgattcacacccagtccctgccacagaccgtctcagacacgcacagtgggcctgctgcatgcgtgttacctggcttttggctccacgctcactcatagccatgtccacatgggggcttgcacacaggatcactcacatatgtacatgtacccaccacaaacgtgcaagctcctgcacacatgcatgcacacaaacgtgtacacaagtgtgagctcctacacgcatacacacacacacgtgtacatgcaccaaagcatgtgtgacctacagacatgcagaacatgcacgtgtacacataccacagacacgcgtgtgcatgctcctacacaatacatatgcacatatcatgaacagcgtaagttcctacacacggacgtgtgatacacacatgcatgtacaggtaagcacacatgtacaagctcctacaggcttgctctcacacacgtgtatgcacagcagagagacgtatgagcttctactgcacacatgcacacacacacgcacacgtacattcactacaaacgtgcagcctcctgcacacgtgcacattcatgtgtacaccacaaatgagttcccagacgtgtaaacacacgtgcacacatcgtacacatgtgagctcccacacgtacacacagatgcacatggacacaccccaaacacgcacaggctcctacacacatgcacacacgtgtacaccacaaacgagctcccagacatgtaaacacacgtctcccacacgtgagctcccacacgtacacatgcacatgtacgcaccacaaacacatgcgcaggctcctgcaggcgtgaatacacacatgcacacacatatacacacatgtgccacaaacaagtgcacactgtcctggtgtcctgcactgcatcctgcctccttgctgaggggcccctgtgagaggcctctggatgggcatgggaagatgggctccctggcccccagcccatgcctccctgggatgaagagtccccctcctggcagaatgtctgggctttgcagagcaggccccgggggtgaagtcgcagcttcacttacaccagctgctctgtgagcaaggcttggtgccctggacaaggcccttcccctttagggaggtccagcctcgcaagctgaaacctcccctcggctcagccctataccaggcggccacagcaggactggccacacccacgccgcacctcatccgtgcacgcgtcggagcacggccagccttccgccacgagccagctgggaagggccgcggccgcctaaagccccagtcaacccagcctgtgtctgagcagacagggcgaacaagcaggccacaccgtctcgagggaggaggccagatgcggccagcgtctccaacagggtgaccatccgctcggcttgctgagcgtttaaacaaatgtttagacaggctgtggggactcccctgagttgagccttggccaggggtccggtgctgtcgcgggaaacctccagccttgttcttcaaaccactcagctcatgtgttttgcactgactagtactgaataatacaaccactcttatttaatgttagtattatttatttgacaactcagtgtctaacagcttgatatgcaggtccttgcatcctacatttctttaggaagttacccatttgtaactttaaaaacaggaaaaatatcagttggcaaatgcaatcttttttttttttaagctaaaggtgggtgaactggaatgaaaatctttctgatgttgtgtctataagcagccttgatgggatatgttagaagtgtcatgaaagtgtgattctacttttgcagaaaaatctaaagatcaatttatatagctttattttttactttatcaaagtatacagaattttaatatgcatatattgtgtctgacttaaaattataatgtctgcgtcaccatttaaaatgtctgttcattatgtaatgtaataaaagaaggtcttcaaaaatgtatttaacatgaatggtatccatagttgtcatcatcataaatactggagtttatttttaaattattaaacatagtaggtgcattaacataaatcagtctccacacagtaacatttaactgataattcattaatcagctttgaaaaattaaattgttaattaaaccaatctaacatttcagtaaagtttattttgtatgcttctgtttttaacttttatttctgtagataaactgactggataatattatattggacttttctctagattatctaagcaggagacctgaatctgcttgcaataaagaataaaagtctgcttcagtttctttataaagaaactcacacaagtggtgtgtacattttctgctctgagaaactgtgcagtcagaacacttcgcagcgtgcttctgtgcgggatggaggtggcaagcccagtgggtgatgtgggccctccctggctgttccctcggctgccaccccctgcagggataccaggtgtgccaggtgcagggccctggtgctgactgccctggatgccagtgcctgcacagaaccggaaacaccactgggtttcccaaccttctggtccatccccaccacaagctcctccctgacctctgccaagctcctgcctgccacctcgtgcttggggtctaggtgccccctttccatcccaattttccctcttgaccaaaccccaggctcctccaggcccttcagcctcctgggctctgttggctgaacccagcctttcccactctgaagtagagggcattccctgccccctgccactcccagccctggcagaattctgggtgctgccacggagcccccggaatgccccctggccttggaggccgtggccttgtcccaaccctgacctcaccctctctcgagttccacccagcccggccgtgtcatactctgcagttttgtgtcttgtctggaaacaccaacttcaaaacaccaccaggtcccaacttctgggatcccagctccattggggcacccggagaggggccttggggtggatcctagagcatccctggtggctggtgcctgagtcccgcctggctacatctcctctccctgctcagccacctgcttcccatggagtctcagctcagggccacgtgggaaacaccccgggaggggacagagggcccctggctcgcaggctggaattctaaacatgggactttttctggctcctgaacgccacaaagtcgggggtacttttcacaggcagtgctccgaaggcatctgtggggtgaatgaacctacagctgccctggattctctccgaaatgctttcctctcgttccctggattctcagcatcttcatgtgggcttacctttacctttccagctcgtaaccctgaagccatcttccgtacagctgtctcttcctcttgtagcaggaaaacagataatgctgtgattttgcgggtcatggggagaagaggggaggggcagagcaggctggtcccagggggcggcactagggtgggaaggcctggccctaatgagtgacccaaactcgcttcacctccccctgctctccagacagaagacatgaatcctgaaagcgagatgcccagtgaccctgcccactgcccaaggaggaggaagcctggccctccctgcccatcagggcctcctggggaagccagagggggatgcaagcttgccctccacactggcccatctgtcccgtgccaaagatcttttcttaactgcagatgctaggtcactgggggcctctgtgggtgtttagcaaacatcatcaaccacacaggccacccgaggcccccacagcagatgatgccgcctgtggacctgaatg

SEQ ID NO: 50 - DNA, 120294 bp, Homo sapiens
  source 1..120294: mol_type = genomic DNA
ctgcactccagcctgggcaacagagcaagactccgtctcaaaaaaaaaaaaaaaaaccataaagaaaaaagaaatagcagggtaagaaaatgaagaggaaaaagaggacccaaatgagagaacattgggaagggtgctagttggacacgggggaaactggaccccgtttcacaaccctgtttctccatgcacatgtggctctgcttcttgggggcagagatgacagcaaagaaggacagggggtggtgtgagctgttgggttagaatgataggatcaaagaggccttttcccaaccctctgtttaaaaggttgggaagtagtggccagtcaccttcttcacagcatagctcatagctataacctgtgagacatatgtcaatgtgccttccataagcatataaacatgagtgtgtttgctgaggtaggtgtgggaatctgtcagtcaatgaagatatgttgtgtgaaccagctgatggtgcatgtttgtgcttgaaagccataaagttctatgcaaaatctatgggtggcactgttgcacaatgctagtgggtgtgtgggtatgggggtgtgattaactgtttacaggctgtgtataagtgtgcatggatgtctgagtgtgtgcaaattaaaacggaaatatgtgccggagtatgatacaaagtacaggaaagtactcgggctttggagtctgtctgacttggtcttgaatcgttggctctgtcattagccggatgtataaccttgggccagacactcaatcttcaattccctcaactaggaaatgaggttaataataagtacctttcaagattaaatgaggactagaaacgataccatatagacaaagcttttggtgtcatagcccacgcatagcaggactcaaaagtaagcagctattttcatgcactgtcagtatacctctggtgggtacagggacaagagggaacaaaatgtgacctgtatataaggtgtaggggaggacgggtgtgtgtgtgtgtgtgtgtgtgtgtgtgtgtgtgtgtgtgtgtgtgtttacaaaacaatttattctccttctccaaggaaccccctattcagacaggagcaggaaggtaggaggggacatacaagtgtccacagacacctcgggtttctgggtcctggatctaagtgagtaaggggttgagaggcccgtaggagctgcaggaagccagccgcctgcccaagcttccttttttttcccctccgcccagcaaccgttgaataccgccacccacatccactccccacctccaccctcacccctcctccacccctactcagctttctattcaacaagtgagagcaagggcggggaagaaagccgacaggggagaggattgcttccctttcttttcccattcccccttaagacgaaccaggaagtaaccgcaagaatcgggccaccttaacagtagagtaatggtttggcctcgcgccaagtcccacctctgttccagctcctgctcctcccctctctcttcccgcactgcttggggagagctggtgagcaagagtctggcccgagttagctagagctgttgccatgacaagcattttcttaagaaagctctgctgttgagatcgtccaaagctgggggctgggagggggggcacgaacttcgtggggcaccatccctccgaagagagcaagatcagagacacccgcccagctctcctgcaccctttttctttcaggaacctgagaggtccttcccattggaggggcagggggaggagacccagcccactccccggccttagccagaaaggcaagagagcaaagccagcgtctctagcttggttgccacactggggagactggtgggtggtcaccccaccctaccctcatccatggaaacccggagggagagtcccgcctgaagaaacctggatctttgctagaaagagaggtaggcttgcagagaatgaattgacttgtgatttgcaaactttgtttctttcttttctctcaatggcttctaaaactccccgattttcctctttctagaatatttcatgcgactgggtttggaggattttttttaaaatatgtgtgtgtgcacagatttgtcaaatactgttttacctattatcagttctgagaaaccatatagtcgaacaagtgatttatctctcttttcctagttcttgtcattcctgggctatggggtagggtaatggagggttctctttttgacaccaaaattgagctcttggaaaaaatatttatctcccctccctcaacccattccgttcctgccctccccttccccccttggcttgggaatgagacgcaggatggaaaactgttgcaaaaatattttccgtgtctgttccctttctcgaaagcccaaaagagagatggaaaaaaaaaaaaaaaaggaaccaaagaaatcttcagcagaaagaggggctgcagcgggaactaggagaggggcactttggggccatggggtggaggtgggctgggagaagttggcaggagtggggaaggagagtgcacgaattaaatttctttagctttgcagagaaacctcagcagtttctctgtgctgcttgcaaaacatcctcagactttcacatgtataattagctgtggaaaaagctgggagttacctcgtaccgctgttgtttgagtgtgtgtgagcgtccagaaccaactgtatgagtgtctccgagggcaccgccccacacatctctggtcccaaaggggaggaaggagaagggtgaattgaaaagtttccgatgtcgaggctggacactgtggggctggtgagtgtttggcagatggggtgggccacaggcatctgtggaaggatccctgagcgtctcgggccactgccttggcttgctgaagagctaggaattaagactgggattgtccttcctgctctcccttctctctttcttttacatacttggctcgctcttggtagagggggctgctggcatccttccccgagtcgagtctggcctcttacactcctccacctccctgagggtacccgccgctcttctccaactgggtgtggagggtgcaggagtggccagccgcatcttgggaggggagtgggcactctgctgccagaggcacgtccctcctgggcattcctgccggacttaacaataacttgcagacgtgatgccggcgcctgctggccgggcagggggaatgtcagatgaagaaataggccggtactcaactgaggcccctgtggagaggggaaaggagtgggggagggaagggaaacaaaatcccattctgcagcgcccccctcctctgtgtgaggagtctggcagggagtctagagaccctggccctgctccttaagcccctccccaagctgccccttctccacgcgcttcccattggaggccctactacgccccctccactctgagccctctacctggaggaaggagaccaggctcattccaggctgggccaggcccaggaaagcagcctgggagtgacgaggggctgggccaggagtgtttaggaagaaggggagtggaagaggcctcctagcccatgtgctgagttaccctccttggctgagggtggtggcttggggagcagactctgggaggggcaggaaggatggtggcagcttggtaaggcgtgttctggaaggtgggccctaaaccctgaagcagacaaatctgtgggaatcaggctgggggagaggaaacacctgccttcagccccagggcttggaggagtggtaaaggctacagctgagacactgcgggagaaggaagtaaaacacttagaggagagctcatctcggggctggggatgcaacaggaacgatttgattttcactttgaggtgttgattgatctgactgcacccctcggctagacagctcttccctacctgtgttctgctcgagaagggaatgaggccttccccagtgggcagggcccccaagacagaattaatgcccgtgttctggagggaggggatccatttctatactcctcctcgggagtcccatcctccctgccaccatcttgctgaggtgcaacctcgaaaatcacgccgctttcgccgcggcctcccatcgtggaggctcagagtgcagctattcctgcagccggccttcctattttcagtaatctgattaggggtcgatgttggtgggctcggggacggcttctccgtgaggtcgttatttagcgcgcaccgggtcgcctgagcccggggtcgcggccaaaggggtaatcggctcccgcagtctcagcccttcccccggggctcggggcaggattgactgcgcaaccctgcggcccctgtgctctccgcggcctctgcgaccccgccccgccagcctctccgccgctgggctccaccctcccgggctctgctgtagtctgagaactccgtggagaatgcgaaccgagcggcgaacggaggcttcctgcctcccaggttgtgccgagcctcagacccttctcccttccatttaccaccaagtctctagattcaaggtcaagtcaaaggagcacagcccgtcttacccctgggactcccagcgcccagcacggagcctgggatgttagagcgctgggtcaaggcatgttgagagaagcacgggcagtttgggggccttggaatcagcctgacgccagcgagttcctaacccgccgtctggcctccagtttcccctctgcacaatggaaagcctgctctccacggtagaggtgacagggcgtggctaggcagatttgtcacactgctgtggtctttgtcagaagaaaatcaaaatgagagggcccagttaggggcagaaggagagcagttagaatttgccgaaggtgtgggggctggaagaggtaaggtgatgtgtaggggctggatgtcctgggccaggatatcgggaggctttactcttccccactcccactaaccggaggtcccgagaggaacggggtctgggctgctccctgccacctgtcagcaggtcaagccttccaccggaaactgccccttattcaagaatttagcttctctcaaaaactccgaaaccccttttctctctctctctctctctctcttttttttttttttttttcaatgctcctggccttggacccagcacccaaagacatggattagccctatccactaggacagagcattgcagacccactaagccttggagagagaaaaggatcttgttcattcttagtccccagaatgaccaagacaaaccccgttagccaaacccctaaaaaactgtttggcttaggttagattagctccaagtgtttgaccttgaaggggaacaccccacccagagtcttaactatccttctctggaaggattcttcaggcaatctgaattcttcccccgaagggcgcccctcagacaaggctccctacccagcccagttccctgcttctcagataagcattgattcctgtcatcccagtgggtatttggtgggtaggggtgagaaggaaagagggatgagaaaagcaaggcctctgccttgtcagactgggatgacaacctttctccactcatgtccccttttctgcaggtcataggattagagcaggccctggggctggagtccaaaatgcttgtgtggaatgttttgcccttggcttcctctgccagtatctctccttgtgtcctctttcctctttcccttgtgtgagccattcttgttccactgacttatttcctctgtacatgttaaaacagaaatgacagggactttctatttctgcctctaccttaagccagtcctctgtgttcagcctacatgaacttgagttgaggagggaaaccaggcaggatctagtgaggaccagagccaagggctctgggtcagggaagaggcttgagaggcagtctatgtgtgaaggatagtggagaggccaaaggaaaggaaaggattgagaacataggtgccaaggggcagagcccccatttctacctttcctcaccccagttcctctctgcctaagatcctcagcctcattactcacctctgctctagtttcccaagtttcatgcacaaatccctgggacaactcagggaagatgaactgggatgggattactaagacccccttcctcttgcctttctgccacttcacttggggtgtggcaaagggagtttggagcagtgcgtttattggtaggaaggtcagggactctcagctaggttcaaggaaagtcttagcttagaacacctcatggcaaggtctacctaggttgcgaaatcaatgccaggaatacaaacaagtagtataccctcaatactaacagcccatctaacatcccaggctccgtgctgggcgctgggagtcccaggggtaagacgggctgttagtattgagcccgggaagttagcaatatctaacaaagctacgtacacatttacccagcaatcctacgtctaggaatttatccagaaggtgctcattcacaaatatggaaagctacgtacaaggtgatttttgtttgtttgtttgtttgttttttgagacagagtctcgctctgtcgcccaggctggagtgcagcggcgcgatctcagctcactgtaagctctgccttccgggttcaagcaattctcctgtctcagcctcgtgagtagctgggattacaagtgctagccaccacaccggctaattttttgtattttaatagagatggggtttcaccgtgttgcccaggctggtctcaaactcctgagctcaggcaatctacctgcctgagctgggattataggtgtgagccaccaagcccagccacaaggtggtttttaaaggcatatttacaataggaaatcattggaaactatccaaatgcccattctttaaaaaatggttaaacaaacaatggtacagtccatacaatagaatcctaggtagccaaaaagaaaaaaaaaagaatgactaggagccctgtgaacttatatgacatgattgttaggatatattattaagtgaaaaaaccaagacatagtacagtatatagtatgccacctttgggataagaaagcaggagaagtaagaaatttttttttttttgagacagagtctcgctctgttgcccaggctggagtgcggtggtgggatctcggctcactgcaagctctgccgcccgggttcacgccattctcctgccttatcttcctgagtagctgggactacaggcgcctgccaccacgcccggctaattttttgtatttttagtagagacagggtttcaccatgttagccaggatggtttcgatctcccgacctcatgatccgcccacctcagcctcccaaagtgctgggattacaggcgtgagccaccacgcctggcctaatttaagtactttttaaccttcattccctgattctatattcatattttaagtaaaaaaaaaaaaaaaaaccacctacaaagaaatcttgacctttactttgtagacatgttattggttgtggtatttgtgtcataaattggaaactgtttcgtttattgtatgatagatgaaatgagtaactatggtgatatttctggaaatcagggtctcactatggaaaaagagagatataagtatggaatgggggaaggggaaaaagaatctttcggggtttttttgtatatcttgtgggtctgtccactgaaaggactgtggaaaggaacacacctagtacctggatttttatttctaagtacaacttcccacgggggaggttgtaaggaacagtgctccttgaaaaaatgactaatttcaagtctgagactgggaaagtataagtgaactgtgttgtgccagaaactagagcatgctcatgtcatgacatgttgtcacaggagctggcttaaagggtctcccgccaaccagaggtgaaacacattaagcattccaaaggataatggtaatagattgtaacacattgaatattaaaaattccttgagtctattttgacagttgacatggacagggaggagcagggagggaaaactctgaacagaaatgccaacgaggccagacacaaggcctcactctgtaatcctaccacactgggaggccagggcaggaggatcgctggagcccaggcgtttgaggctcccatgagctctgatcatgacactgcactctagaatgggtgataaagcaagactcagtctcaaaaaattaaaaagtaaatgccagttgggcgcagtggctcatacctgtaatcccagcactttgggaagcccaggcaggtggattacttgaggtcaggagtttgagaccagcctggccaacatggtgaaaccctgtctctactaaaaatataaaaattagccggaaatcgattgaactcaggaggcagaggttgcagtaagccaagattgtgccactgcacttccagtgggagacagagcgagactccatatcagataaataaataaataaataaataaataaataaagtaaatgccaactaataaaatctagtagtaatgacaagatttttctttaaatttaattttatgtgaggctgaggtgggtagatcacctgaggtcgggagttttagactagcctgaccaatatggagaaaccccgtctctactaaaaatacaaaattagccgggcgtggtagtgcatgcctataatcccagctactcgggaggctgaggcaggagaatcgcttgaacctgggaggcggaggttgcagtgagccaagatcacactattgcactccagcctgggcaagaagagtgaaactccgtctcaaaaaaaatttttttaaatttaattttaatagaaaaatactagtttcatatatgtatggggtgtaatgtgatgttttgatatatgcatacattacggaacgattaagtcaaactatcaacatatccatcacctcacacatttatcgttgtttttgtagtgtaaacatttaaaatctctcttagcaattctgaaacatgcattacattaactatagtcaccatgtagtgcagtaaatctcagaaacattccttctgtctactgaaactttgcatcttttagccaacattatctttatttacctacctatttttagagatagggtctcactctgtcagccatgttggagtgcagtggcccatagccttgaactcctaggctcaagcgatcctcttgcctcagcctcccaaagcaccaggataatgggtgagacacagtgccagactggaactttaaattgaccagtttgcagcctctactataatagctgatttagtctagcgtttaatggatactaaaaccactgggtgaaagattggtcttagcatatcttagtttgggctgctaaaacaacatcatagactgggtggcttaagcaacagaaatgcatctctttgtttgtttgtttgtttttgagaccgggtcttgctttatcatccagctggagtgcagtggcacaatcacaactcacagcagccttgatctcctgggctcaagctatcctcccacctcagcctcccaagtacctaggactacaggcgcatgctatcatgcctggctaattttcatattttttgtagagacggggtttcaccgtgttgtccagattgggctcgaaatcctgggctcaagcaatccacctgcttcagcttcccaaagtgcggggattacaggcatgaaccaccgcacccggccccatttatttatttatttattattttttgagatggagttttgctcttgttgcccaggctggagtgcaatgctgcaaactcagctcaccgcaacctccgcctcctgatttcaaacgattctcctgcctcagcctcctgagtagctgggattacaggcatgtaccactacacccggctaattttgtatttttagtagagacgaggtttctccatgttggtcaggctggtctcaaactcccaacctcaggtgatccaccctcctcagcctcccaaagtgctgggattgcaggtttgagctatcacactcagcccccatttatttttgaaacagggccttgttctgtcacccagactggggtgcagtggtgcagtcatagctcactgcagcctcaaactcccaggttcaagcaatcctccgacctcagcctcccaagtaactggagcaggtgcatgccaccatggctggctaatttttttgttgttattgttgttttgtttttttgtagagatggatgacataggaagactccacctctacaaaataaaaaattagctgggcatggaggctgtgcacctgtctgtagtcctagctactcagcaggctgaggcaggaggataacttgaggctgcagtgagccgtgatcatgaaactatactccagcctgttgacagagtgagaccctgtctcaaaaaaaaaaggtgaaactaagtaaagggtctgcagttgtttattgtgctatttttttcaacctttcaggtttgaaatttttccaaatacttagccagagagagaagtccatgccagaggcactcctagattcctggtttcttctcactttatctgcaaaactcctgaccaataggagtgtcttttctaagctcttgggtgctgagagtccccatggagcacacagagggatcttctaagaaagtaaggtcctttaggaagcctaccttcccaccctcactgctccccacccacagcctctcctgtccagacaggagcacctgggccctgatgagtgggccacaaagggaggtaggatgacaggcattctcccaccatgccatggggccagctgagggaacctggggactgagggcttccagagtcacccacctaacttttgaggagacaggtcccaggctgtaagagaagaaattcaccaaacagcccagagattgttgctgaccaaacctttagtgtcccttagaattctctaattaggtgattctgaaagaaaccagcaagcagtgcctgcctggagccttcatgcctgagctaagcaaggccttctaggcactcccttggcaagggcagcacacctggctgtcctgtcattgacccaaatcattgtgctacccacccccgcctccccatcctgatcgtcgctctggagagagattgagtttccaggatggcttctctctctctttttctccctctcttctcctggaaaccctggggctaggccctacatgactcagggctctttttacgtaggctcatgtaggtgacggctattaatcctttagtcaattccccttctgtgttggtgagggagcctgaaagagcgggagccaggaagttggaagggggcagacagggaggagtttgttctagtgggctgccaggcttgccagaagagcacgggactgggagtcagaaaactggtaatctggactcttgtctgctgtgtaaccttgattgaagcaggggatatctctgggccttcatcaactgcactgttacatgaaaccaagtttggacatacagacattcctgattcaagaccctcctcttctatagaagacaaaggagtaaaactctcaatgcccaaaccaaactcttttatcacagatagagtctagcacaatgtaacaatttgcagccaagtcccatccttctgcccaggatgaccaggggaaaagaggccaaaaagcatatggctttgaactgccaccattgatgtttgggagtagaacaggttctaagatttcccacctccacctgccgggaacttcaattaggaagtaccttccaaggccgtaattctgctatgtcctaggccagaaactaaggaatattagctagaggtagagaaattcaaactttcacaaagtttcctagggcacataatccccccaaaagttattatattgaaccatatgaaaatgccaatatacggctgggtgcggtggctcacgcctgtaatcccagcactttggaaggccgaggcaggcggatcacgaggtcaggagattgaaaccatcctggctaacacggtgaagccccgtctctactaaaaatagaaaaaattagccgggcgaggtggcaggcgcctgtagtcccagctactggggaggctgaggcaggagaatggcgtgaacccccgggggggggcggagcctgcagtgagccgagatcgcaccactgcactccagcctgggtgacagagcaagactctgtctcaaaaaaaaaaaaaaaaaaagccaatatacaaccacttttgacctacaaaggcaatttcatgtagctcacctaacaatattattcgacactggaataatgtcagtggcattacagtcagtgttgtgagctgcagagattaggttttcatctgagctgtgggttggattagaaattcaggcaaagttgccagctgctaggccagcttaccctccttgccaatccagactttcagccctagaggtagacatgttggcagagcccttgtttggactctggttgagattctagcattagccttcctggcaactggccagggaagctgcccaaggtagagaggaatgtatcatccatctatagtctgcttttcttgtgtcccaaatgccctgcttcctatcttgggagctgaagacggaggaaaatttaagaaaggaggaaatggaaatactggccctattcatcctctgtctagtgggatacaagagcgggaacacacacttgaaatctcatctggtgcagggacacatgacctagtgatggctggtaactgctaataggatggctgggggctgaaggggtcttagtgggaatggggagactagaatttggcagggctcaactggaaattattcatggaggaggtgattgccaaacaggattttaaagagaaaggacagatttgatggaggaggggaggggagatggggaggaaggggtgtgctgctaccacccgactgaggacactcagagcatcctggagaatcggatactctggcaggtgagggaggctgtctgatcccactcgctggaaggcctccagcctttgtctgagccagtaccggtactgtgggcaggatggcatctggcctcagcagcggcctgccacctgtctgctttcctggcacttatggaccattaggatgattttttgatgttttctccctgctgtccatattacagccttctttgtggggagcactcgtacgacatctgttaggatgcaaggacaggcacagcaagcagcaagcatccattccaggagctttctgaccttgtacaggggaggacggtcaccaggctttgggcttgtcaccaggctcattttactgagacagagcatttgagatggacagagaactggcacctcgagacttgcccaaagacactgggttagtttgaggcagaggtgggggtacagcctagttctccccactccaagactgggacctcgaccccatcactgcaacactgtgtgaccagatcaacaccaaacttccctggttcccaatgtctctacccacatggcagagagaactatccccgtccctccaaggttgatgtgaggtcatgtgctaggagcagtttggaagacagattctagaaaccataaaggtgctggtggcatgattgttactgttgctgttattattaacaattaaggtcattagcacacagaaaatgcaaagaagtatttggcactgcccgtatcaccgtgcagctcctaacagtcccctccatggctcctcctcgcacactgggccttgagctgagagaggcagagtaattgagaggggaagcagaagtcctgggaagaggtgtgcagagatctcctcctgccggggtattcttggccctacgctttcctcagggtgtgcctcctccaaaaggtcagaggaagtgcagaggggaaggaggggaagcactattaactccatccttccttagcagctgactaagtcaggttggctgctgagctctgatttgggatctaagagtcaagagggcggggccaccataatgtgacagcacaggctgatttgattgccagagccaatctgtcattcatttgcttgttcacttatccatttatttatccaacaaacatgaagcgagcacagaccatatgccaagcactatgttaagggtttgggaagaagtggtatccgggaggcaaaggaagggctcagcatcactgatgttaagctcagggatgattgtcccaagcctggggactcacagcaagccccgcttgttggtagtgctctagggagtttgcatctgtttccctggagagcacatttaacccttgacttcagggaggtaagatctagacccgacgcacaactgagctggtaggggccttagatatcattgcagggcagcccctggtgttagcagtgagaccatggcctgaatggtaaagggcttgcgcttgtcctttgctgaagaaagccttctcctggaccagggcatggtgccgaagctgggtgtgggtccagcctggtttattcagccgctcggttggcctcccagtgttacctgactttaccatcccctgcttatatccggagcctctgcctctgatggggtggagatgttctgttgctgggatgcccagaggaatccaaatggtactgagaaatagaacaatacctctccagagaagccctccagttcctcctccagtctttacctctcatttcagcctcttaatccctattttcagaggcaatgtggtataaaggataaaggagtggatttagcttcagttggtacatgctgtacacatctgcacctagcctgagttttgccctctttaaagtttgtataatatcgcctttcattacttaccccatagagtgttatgacagacaaataaggtattgtaggtaaaagcatcccataaacattaaagtgctagatatacgtaaagcttattattccggtgaccccctcttcctattccccactcttcatctcagttccttctcttgactgcccaaccccttgaccccactcccaagaacatcctcctgttctctgtgtgttcccactcctgctctcactgcatcctccctccttgcttagatcaagatctaaaacacttgttgcatccttttttgagacagggtttcactcccatcgcccaggctggagtacagtggcacaatcatggctcactgcaacctcaacttcctaggatcaggtgattctcccacctcagcctcccttgtaactgggactacaagtgcgtgccaccatgcccagctaattttttttttttgaatttttagtagaggtggggtttcgccatgttgcccaggctggtctcaaactcctggtctcaagcaatctgcccaccttggccccccagagtgctgggattagaggtgtgagccactgcaccctgctcttgtcacatcttaaataacaatgacattggtagaagtaataatcgagctaacatttattatttatgtgataggtattaaacttgaatcatctcatttaatattctcagtgaacagtgaggtcgatattagcattgtcttcattttccacatgataaagatgttcataaaccataaggctaagatgcacccttagtttagcccatttatagatttcctctttccatggctgagtgactgactggttgacaagaacatgggaagtttcaacagcatttattgaatgtcgactaaatgccagatgcttccaaattatgtcacaacaaccaccttctgagacaggtacaggctttttcttggagatcatctggttgtgagaatagaagcctactcagagaagcaaaagtaaaagggagctttattaggccattacagggaaatagcacagaacttaggtgtgggaagtgtagcccctctgtgagccacacctacatcctggagctgtagcactctcttcttcacagatgggctcctgctctttcatccacaagcacaggacccattgtgggtgaaccaggcagtaggttccatctgtcagtccatgtggccttcccacttagctctccgaagtaaattaactcggtctctcagtccaaacgccaacagatgctgattccagcttagatctgatgtcctctgcactccagtgatctgtggcttgtggcaggggagggagactaatcaggcctatctttttcatcaggtctaggggtgggagcagacatttctagagggaaaattcattggctttaggttgattcaacccaactacattcttcaccacaccagactctctctaggatatcttaaagataatgctctggttgaagcccctaaataagagggcatgcgagttgtcccagaatctgtggattcagctgggactggaaaaatagtactaaccatttttgaaccctgctttgtgccagccgattaatatacattatctgtaatccttactacactcttacaacatgctatggttcccattttacagataagaaagctaacactccgtgagttaaatagcttgcccagagatcatctggctcattagggttggggctgatatgtgacccaggcctgacaccaaagctcacggcccttctaatacacaaaaaaaggttatttactctcctggaagataagctccatgagagcaatggtcttcgccttgctcattgatatatcccaagtgcccagaacagtatttggcacatagtaagtactcaataaaaagttatttagtggattttgctttggtaacttttgtattcctaggcttcccaatgtcagagggaaaaatgactcagacagtgggccactgagaacagtggggtaaccctctgggcgtgcttctggtccctaacccccacagcctactgtgttttgtttttgttttgttttttgtttttagagacaggatctcactttttcgcccaggctggagtgtaatggtgtcatcatggctctctgtagcctccaactcctgggctcaagggatcctcccaactcaacctcctgagtagctgggactacaggtgtgcaccaccacacccagcaaattaaaaaaaaattttttttagaaatgggtcttgctatgttgctcaggctggtctcaaacttctgggctcaagcaatccacctgcctctgcctcccaaagtgctgggattacaggcgtgaaacactgcacctggcctcacagtctgctttgatgggggacattaggagcaatatagaaaagtctgaaagaaagtatgaccctggatttatctgtgttttctgtttgtatttctgacctaagccatttagccctgtaagaggagcagatgaaaagagatttccttaacactggaaaatccatttactgggactaggaaacaggatgctgaagtcttatattgatatagcaaagaatgctaatttccactgggttttcagccccgggggtcagagcttaccaaatcctgaatccattcctgtgcctttctgtataaaaatgccctgtgtcctaaatcacctagttggccttccaatcccagcaggtggtgttatataaaagtgcagatttgagggagtctgatggaactggattcaagtctggctggccagctgtgtgaccgtggacaaattatttaggctctcagactcaatttcctctggaaaatatgaacacacacaaatgaagagtgatacatgttctgagtgcctggctcactactatgagccagggtagtcatcgaattttaatttttcctatcttgtccctccatttctcccttccttttccatggagcctggcaccagcctgcccacctgctccctgctaacctttgggctcagtacatttataaaagggtcatagcccactgtctccccgtagcgaaaggcccagaggccccagcctcctgcaactctccatcaaagggcatgcaggggctccatcatttccatgagacaggttaccctcttggtgccagctctagggctttgcttgatatttgagcaagaagagtcctggtgaaataaggcagagtggagggtagagagctgcaaccacctcaccttgtttactcgtgccctgcattcctcccctgggagtagcggctgtagaagtcaatgctgggaaatctcttgttgatggagggagtcagactgggtgacaacactacttgtttttgtagaagctgtagcccaagggtgctatcactatttggtcacccagatcaactgtcagctgcactggaattgagctgcccctggataaacaagcaagagagtctcaggctggaatctcccctgcttttcccagcacacacccacgcagagactttagctggcaagaagtggcagcttagccaagataatgcgtgaaccagaacttgcctttcctggctggaaggggcttggcattaagtgcagttcttgctcctgcttcctatagatcacttaagtgctccaggctctcttggaacagggggaattctctggtcccctcccagtttctcagggatggcatccaatgatgggagatggtttcagatgcagtgacttgcagacaagggtgtgaatattagctgagagttcatgtgaacaggcttatggcagcatggtttctgagatgcagcgacttgttggttttggctgcagcgttttcactgagcccactcatcagcctgcaagctacttgaaaggagagtgatgctttagtcattcctatatactcggtgtttagcacagtctttggctcatagaatgaggatcagtaaagaacggatagatgggccgggtgtggtggctcatgtttgtaatctcagcactttgggaggccgaggagggtggatcacctaacattaggggttcgaggccagcttggccaacatgatgaaaacccatctctactaaaagtacaaaaatcagccagatgttgtggcaagtgcctatagtctcagctactcaggagactgaggcaggagaattgcttgaaccctggaggcagaggtggcagtaagccgagatcatgccatggcactccagcctgggcagcagagcaagactccatcttaaaaaaaaaaaaaaaaaaaaaagaatgcttggatggatggatggatataaacaaatagaaaattttctctaaacaaacagaccacagtgaactttaccttcttccttcccagggccaccctccctgctcaaaacctcatcatctcatgcctgaataattgcaaagccttcctaatgacaggcagggtggtctagagaagtgagttccagactggaagttgggaaacctggaacttgagccacttaagttgttctgtcacttttgggaaatcactgaacctttctgggcttcaatttgttcagatgtaaaatgaagagttagggctaaatgtacttctaggatgtttcaactctaacattctctgcttcctcctacccaaacaatgctgcagattaattatagttgggtaccaacatttaaaagtaagatctcactgctgtcttgctcagctgggcttcagtgacagagactggtgacatcttcctaggaagttggtgaccggagttgaaacaatggccagttccccaggagacttggcttaggaattggtctcctagaattattgagcccttatctaaggaagctccacctttcactctccctcttcaaactcatgctgggagcttgtgcggctccctgcagccccgctctgtatgactctatgtggccactatgccaaggtggagaggaggtctggactgcatttggaatcctggtaatggtggtgattctctttttacttctttgtggtgtccaacatcctctagtgtcactggcacaaaacaggtcaggctattggaaggccacactgcttaacaacaatgtcaggagatccaggctctcagctatattcagattagtgaagtgtacattctcctaacttgctcagcttatctcctgcacctagtgctataaacagttgtgtttcagagctccccaggctggccaaatccatagttccaatccccaaagtcccttgtctaaatggggtctaacttccgccccagtttaacccagggctgtttctgactcagcccctgtcatcctgcctgggccctaggcaacactgcctctctaatgccctagccagacagagcattcctgtttacccaactcacagactctccctactttctgagttatatgcttttcttctgctagttgctttatagcttggtccattattctgtgatctaatctacctagttttgtgaggggtttttttattttgttttgtttttcatttaaaaagcatctatattttctttcatcagctttgcatttatcacagtcatcactcctcattcaacacccttcccagcttatactcccttttctttcttttttttttttttttctggagatggaatcttactctgtcacccaggctggaatgcagtggcataatctcggctcactgcaactccgcctcctgggttcaagcgattctcctgcctcagcctcccaagtagctggaattacaagtgcctgccactgtgcccggctaatttttgtatttttagtagagacagggttccaccatcttggtcaggatggtcttgaactcctgacctcgtgatccatctgcctcagcctcccaaattgctgggattacaggcgtgagccaccgtgcccggccgtatattgccttttcataggaacgttgacatagttaaaccctaccttatcgtatgatcattcttgtttcagccacttttagagacaccacgtttcgaggagggcttttgttgttttctcggtgtactttaatccaaatggcaaatttttagccaggtggttattttttaagaatatttactttttttccagagtataaaagtaatatgtaaaaaggatctcacatatactgagcacttactatatttcaggcaccaagacacatgctaaaactgcatgacctcattccctcctcatgacaatcctaataaggaaggagtcattcctatcttccctttcaaaaaaagaaagtaaggctcaagagataaaatacttttatccaagttcccacagctaccaagtggtggttgtggaattcaaaccatggctctcaaacttcagagtccaagggtgcagtggcacgtgtctgtagtccagcactttgagaggttgaggcagaagaattgcttgagtccaggagtttgaatccatcttgggcgatataatgagaacccatctctaaaaaataaaaaatataaaaataaaaaaacagtcgaccaggcacagtggctcacgcctgtaatcccagcaccttgggaggccaaggtgggtggatcacctgaggtcagtgttcaagaccagcctggttaacatgatgaaactccatctctgctaaaaacacaaaaattagccaggcgtggtggcacatacctgtaatcccagctacttgggaggctgaggcaggagaatcacttgaacctgggaggcggaggttacagtgagccgagattgtgccactgcacttcagcctggtgacagagcgagactccatctcaaaaaaaataaataaaaataaaaaaagattctgagctatgtactgcctctacacaggatcatcctagaaagtgtggaatattcagaaaagcatgaagagaaaactaaaacgttcacaagtccagacataactgctaacattttggtgtagtctcttttagtcttttatatacgtgggtgagtatatacattttttaaacaaaattgggaacacgttgcataataagattttgatttaatttttttttcctacccaatactagatcatgagcattttcccacatcataaagaattggtcacaagtcagccccaaacatagtccagtggaatccaatgatagcaggcaaccagaggcaaagtatctgtggttttagaagggaaataaagaagctgatgggctgggcacaatggcccatacctgtaatcccagcactttgggaggctgaggcttgaggccagggttttaagaccagtctgggcaacttagtgagactccgtcacttaaaaaaataaaaaataaaaaaattagccaggtgtggtgatgcacacctgtagtcccagctactcaggagactgaggcgggaggatcccttgagtccagggctttgaggctgtagtgagctctgattgcaccactgcgctccagcctcggcaatagagcaagaacttctctctaaaaaaaacagaaaataacaacaacaacaaaaaaaacaaacggctggacacagtggctcatgtctataatcccaacactttgggaggcaaagcgggagaattgcttgatcccaagagttcgagaccagcctgggcaccatagtcagaccccatctctacaaaaagtatgaaaattagctgagcgtggtagtgcatgtctgtggtctcagttactcgggaggctgaggtgggaggcttgcttgagtccaggaggttgaggctgcagagaaccaagatcgtgccactgtactccaccctaggcaacagagggagactctgtcttaaaaaatttaaatatatgaagaaatgattaggaaaaaaaaaagtgctgatggccatagcctttgctttggaagctgaccacctggagccagcctaggtggtgcacagggtctgatcctgggatgagaaatcagagaggggagaaggcttggaactcttgggtcacctttgggaggtactttcctctatgtgtctggatctcacatgaaggtgtgagaagatgggcaggccaacttgtgtttgaagtgggagtcaaaatgtaaagtggcttttacacaggctcagctaaaggccaggcttctagaataagatgtggaacaccctaaataaagccccctgtaaatctgtgagtgagattactcattcatggtggagaggctggctcctgctggtgatttgggttctcatgctggcctgtgattggagagaaccataaagatttcctgccttcattctcttaaatgtatatgtgtgaaagagaagctaagtatattttatctgcagctatatttttaaagaaaagaagtgttttttttaaaaaaaaaatccaagaatagcacaagaaggggcagagagaaaggaagatctggaggctgtcaccagccaaaagataattagcaaccatggggctggggacaaagacaatgtctagtgtctatgatgggacactagatgggaaagtccctgtgcttgtggtgggccacttgacaccccttggcagttaggtggctttggaatgacagcccgaggtgccagcctcttggaggttgtaccaactgactgctacaaattcaagagtgataaagagtactggtggcctccatgacagatacaggcttgtccaaggcacctgttcggtgcaggatccagggccaggacatggagtcttgggttcacccatgagctggtaccaccttttgccatgactctggggaaggcttgggctactctgtgctcgtagtttgtcccctggcccataccaaggtttcacccctccaccttcctcctttctgggcatcttgaggacagaaatgagaaaaatggagagagatgctttgggtttccattatgaatatagagagtttttcatcattacattggttatctcagaacctcaggggtaaccaatgtaatgcaatgcatgggaaggaaatggggtattattgttgaacatgccacttaactgctgcagccttttcactctccttaaaatatcagataatatcctcttgaataccttacagggtaaggtaagtgacaagaatcacttgaaatactggatatgaaagtgctttgtatatcatggagtgcctacaaatatacagattcgtatttatggagatttttgcatgggaaagtccctccttactcccctgaggttggggagaccattcatttctccagctcctataaaatttgagtcctctttcttgagtagggtggcttctctccacgctgtagaatgggagagtgaattccagttaagtgcgaatgatgtgttcaaagtgggtgaaaaatcttggaatcttggggcattaaaaagaattccttaatttatttccattcttgaccaagctagtaggtaacagtgtgaccttgagcaagtcacttaacctctgagcctcacttttctcattcgtcattagtttgtatccacaaatgatagttatgataatctaaggagagagtatggaatctaaatggaagtgctttgaaaagttaaaagtgcttcactttagggtgggcgtagtggttcacgcctataatcccagttctttgggaggctgagaatagcttgagcccaggagttcgagaccagtctgagtaacatggggaaaccccatctctaccaaaaccaaaacaaacaaaacaaaacaaaacaaaaaaatagccaggcctggtgatgcatacctgtagtcccagctactcaagaggctgaggtgggaggatcactgagcccaggaaggttgaggctgcagtgagccttaatcatgccactgtactccagcctgggcaacagagaccctgtctaaaaaacaagcaaaaaaccaagtgctgtactttacagaccagaaaaattgaggtcacggaaactccacagcccccactcgtacccggccaggcatgtcacactcgccactctggggcccagggtccccatacgctaagtagggtgtgctccaggttacctccccttcttccagagctgctgaggactaatgagaacactcacttgtagacgctgtaatagcctgttttgaagcatctcagatttaccccagccttcccttccatggtgatgtaaacggagtggctttcacgcacacatcccagaaccagcccagtttttgcccttgtcctctgacataatgcatgcattgatcaatagacatttatcaagcatgcctgccccgtaaagcttggagcgaggccctggtcccctgggttttggcagctcaaggacgggcgctcccggggaagctgtgctgagaagtcggctgagccactgaagccacagggtttggtttcagggaggccaggtgaggggcagggtgagaactgggagggttccccaggtgtgttccccgggttgtggtgtggtgtgatgtggtgggggacaggacgagggtccctggggagggagagaggtgcttggctggctgggtcgagtgagtcatcggccccctctgagcaatcgctgctgcccaggtggagtcggcccgccttatttggggcttctgtgctgagccaggcctccagggctaaggcgtttgtttccccagctgcttcccgggccgcgctggtagccagctgagcccggcgcctgcggctgagttgcaccgcgcagaggccgggggagctgcaggtccgaactcggccggcccggggcgagggcgggcggggagcggggcgggctagggcgagcgaggctgccacacccccgggactcgctggtgcgaggctcagcatgccggctgcggaagtcccgcacagggcagcttccaggcctcctgtccctagagcagtaaatgcagatcagcacttctgcccctcactgtactcccactctcatccccttcctccctctaccaccaccaaaaggccagaatttttaagttgattgatatttttttattaggataataaagtcagatgcagtatattgtgtatgtttttttgtttcgtgttgcgtttttgtagagatggggtctcactgtgttgcccaggctgctctcttaattcctgggctctagtgatcctcctgcctcggcctcccaaagtgctgggattacaggcatgagccaccatgcctggccttgactgtgttgttaaatggctattttagaccatgaaattttcaacaaaagttcttatttaagagtcttgatatttttagatagttccatggctgtctttgatcatacaagttaaaaaatgttgctggtagaaataggaaccattttttttcttctctctctctgtctctgtctttcatttctagttctatctcttttgtttatttctcagatgcacaaaattggatgagtcaaaatctacagttcattttcttgactggtttatgcatgcctcgcttttactgcttatttatatatgctattaatgttttttattaacctaatgaacacacttgaacccaccacccaaaaatgagatcactatcatttatttgcatccacctatgaccctttcctatcccatccccccacctcatcacccagccaaaccactgtcttgggctgtaatgttgtattcaccattctcttgataaccatatgtatgcctaaagaaacatattatttgtacttgctttatatgctttatctaaaaaatatactagctgggcacagtagtacgcacctgcagtcccagctactcaggaggctgaggcaagaaaatcactgagtccaggagtttgaggctgcagtgagctttgattgcaccactgcactccagcctgggtgacagagtgagcctgtatctaaatatatgaacacacggctaggcacggtggctcatgcctgtaatcccagcactttggaatgccgaggcagggggatcacctgaggtcaggagttcgagaccagtttggccaacatggtgaaaccccgtctctactaaaaataaaaaaaaattagccaggcatggtggtgggacgcctgtagtcctagctactcaggaggctgaggagagtctcttgaatctgggaagtggaggtggcagtgagccaagattgtgccactgcactccagcctgagtgacagagcgagactctgtctcaaaaaaaaaaaagcaaaacaaaaccctttagagacaaacaaaaacagaggtttctaccaacagactactccactaaagcaacttcttcttttttttttttttttctgacacagagtctcactctgtcccctaagctggagtgcagtggcacaatctcagctcactgcagcctccgtttcccaggtgcaagcgattctcctgcctcagcctcccaagtagttgaaattcaggcacgcgcctccatgcccggctaatttttttgtatgtttagtagagacggggtttcgccatgttggccaggctagtcttgaactcctgacctcaaatgatcctcccacctcggcctcccaaagtgctgggattacaggcgtgagccactatgcgaggcctactaaagcaacttctaaaagaaataattcaaaagaagaaaaattataagcataccttattttattgtacttcagacactgcctttttattttattattaaataaattgaaggtttgcggcaaccctgtgttgagcaagtctgttgacgccatttttctatcagcatgtgctcatttcatgtctctgtgtcacatcttggtaattctcatgatgtttcaaagtttttcattattattatatgtgttatgatgatttgtgatcagtgattttttggtgttactaatagaattgttttggggtgctacaaatggtgcccatataaggcagcaaacaatcaacaaatgtgtatgttctgactgcctcactgacgagctgttcttcatctctctctttctcctggggattccctattccctaagacacaacaatattgaaagtaggccagttaataaccctacaatggcctctaagtgttcatgtgaaagaaagagtcacaggtctctcactagaaatcaaaagctagaaatgattaggcctactgaggaagtcgtgttgaaagctgagataggcccaaagctaggcctcttgtaccagttagccaagctgtgaataaaggaaaatgttcttgaaggaaattaaaagtgctactccagttaacacacaaatgataaaaaagcaaaacagctttatttgctgacaggaaggaagttcaagtggtctgattagaagatcaaaccagccacaacattcccttaagttgaatcctaatccaaggcaagatcctaaatctcttcaatgttgtgaaggttgacagaggggaggaagctgcagaagaaaagttagaagctagcagagcttggttcttgaggtttaacgagagaagctgtctccacaacgtaaaggtgaagcagcaagtgctgacatagaaaccacagcaagttagtcggaagatctagctaagataattggtgacagtggctatgctaaacaacagattttaatgtaggcaaaacagtcttctcttggaaaaagatgccatctacgactttcatagctagaaaggagaagtcaatgcctggcttcaaagtttcaaagaacaggctgactttctcattaggggccagggcagctggtgacttcaagttaaagtcaatgtttaccattctgaaaatcctagggtctttatgaattttccacccctcaaggttcaagtgattcttctgccttagcctcctgagtagctgggattacaggcacccgccaccacgccctgctaacttttatatttttagtagagacggggtttcaccatattggccaggttggtctcaaactcctgacctcaagtgacccgccctccttggcctcacaaagtgttgggattacaggcgtgagccaccacgccaggcttctagggcctttaataattatgctaaatctattctgcctgtgatctatcaaagaaacaacaaagcttggatgacagctcatctatttacagcatggtttgccaaatatatatatatatatatatatatatttttttttttttttgagatggagtttcgctcttgttgcccaggctggagtgcaattgtgcgatctcagctcactgctatgtctgcctcccgtgttcaagcaattctcctgtctcagcctcccgagtagctgggattacaggcgcatgcccccatgcctggctaatttttgtgtttttagtaaagacagggttgcatcatattggtcaggctggtctcgaactcctgacctcaggtgatctgcccacctcggcctcccaaagtgttgggattacaggtgtgagccaccgtgcccggccagtttaccaaatattttaagcccactgttgaaacctactcctttcaaaatactactgctcattgacaatgtacctggtcacccaggatctctgatggagacatacaaggagatgaatgttgttttcatgcttgctaacacaaaatctattctgcagctcatggaacaaggaacaaatttgactttcaagtcttatcatttaagaaatgtattttgtaaagctatagctgccatagacaatgattcctctgatggatctgggcaaagtgaattgaaaacctctggaaagaatccaccattctagaggccattaagaacattcaagggctgggaatggtggctcatgcttgtaatcatagcattttgggaggctgaggcatgaggatcacttgagcctaggagtttgagaccagcctggcaacacagggggaccctgtctacaaaaagtgaaaaagttagtcaggcatggtggtgtgctcttgtgctctcagctactcaggaggctgaagtgagaggatcgtttgggcctgagaggtcgagggtgcagtgagccatgattgtgccactgcactccagcctgggtgacagagtgagacctcgtctggaaaaaaaaaaaaaaaaaggaaagaaaaagatattcatgattcatggaggaagtcaaaatatcaacattaacaggagtttggaagaagttgattccaaccctcatggctgactttgaggggctcaggatttcagtggaggaaataactgtagatgtggtggaaatagcaagagaactagaattagaagtagaacctgaggatatgactgaattgctgccatctcatgataaaacttgaacaaatgaggagttgctttttaggaatgagcaaagaaagtggtttcttgagatgaaatctactcctgttgaagatgctgtaaatactgttgaagtgacaaaggatttagaatattacataaacatagttgataaagcagctgcagggtttgagaggactgacttcaattttgaaagaagttctactctgggtaaaatgctgtcaaatatcagtccttcatggggatgtaaaaaaaaagaggccaggcacggtggctcacgtctgtaatcccagcactttgggaggccaaggcaggcggatcacctgagatcaagagttggagaccagcctggccaacatggagaaaccctgtctctgctaaaaatacaaaaattaaccaggtgtggtggtgcgttcctgtaatgccagctacttggaaggctgaggcaggagaattgcttgaacctgggaggtggaggttgcagtgagctcagatcatgtcagtgcactccagcctgggcaacatagcaagactccatctcaaataataataataataataaataaaataagaaacaaaaggaagaaaaggaaaaaatgctgtcaaatagcatcatatgttatagagaagtctcactaaaaagtcaatcaatgcagcaaactttattgttgtcttatttgaagaaattgtcacagctaccccacccatcagcaagcagccatccacattgagaaaagacctctccaccagcaaaaagattaccacttcctgaaggctcagatgatcattagcgttgtgttttgttttgttttgtttctgagacggagtcttgctctgttgcccaggctggagtgcaacggtgcgatctcggctcactgcaaccttcgcctcctgggttcaagcgattctctcaactcagcctcccgagtagctgggattacatgtgccaccacgcccagctatttttttttttttttggtgattatagattaatataatatacagccatccttaaagccacaacatatcacagatcacaaaagtgctttcaccaagttacaaccctaacaccttacttttttatgtcatctaactgcaaataagtttctcctcagagaatcagtgcagtcttctttatccttttaaaacttagctggagctgcttaaactaattcttaataccattctgaaactagaaatatactgtttagaacacagaaatgctaagaaagtacaaagactttagtattttttttcattttcatgattcaagtagaaaacagtgccaagtaggtattattctacatggtaaatggaagaaaaaaatgtttagaatgtgaattcactagacctttgcggtattcagaagttaaggatttcacaggtgaaaagatttctctaagagttctgaactttgcgtcttctcacatacttttagtgtaaacactgtaaacttaacatctgtattaatgctgtctttttaggattaatgaataacgaggtagaagatacttcatttaaattctcagacacataattaagtgtgtattaacctttttgaaaggcattttcaacggaactggtggtttttcaggaaattgctgaatacccacgcataaatgcagatattgatgaagtaggatatttgtatatttgctttttttcaatcattcaattttatgaacatggggtctaagcagatttcaaaacaaagaccatttataaaactggaccattttaatgtttacaatgtaataaatctcttgattgcagacatatatggctgtttggtagaaacattacagtaatggcagttttttcagttggtgtgtagtccccaataattatatatgaaattgctgtcaaaccagtaagactgcatttatgcagccatcattttcaggactgttggtaacctgagcatattttctccaaataactttgcctccttgtgtcacaaggcccaattcgctcacatttacctcaatgacaatatctttggtaataacacccacagttgtatacggtggggatgagggattcttctttacaccaagtattggtgggcaaaaggtggctttcagttcaagatgtaatacatgggctttcttgaaatgcatattggcctgatcagtctttcttatttaggtggttttcttgtaaagccatctccgacaaagcagagtttagtaaccaccctcttccatgccttcttctttctctttcctgttcaaacaacttttaatacgtctgtttctccctgggcatgtactttagtcagagggacttcccgttttcccaccttctcttttcatttctgtttaatcatattggaaagtactttggctcgagattgtccctctctgtccagcagataagcaggtactgctccctgtggagtcttttcatccttcttttgtttggtgtttctcttttcatgcatcttgatagtctttttcatttgtattttctcagcatgacactgtttaaggtaaagcttagccttcagaccaatcatttgctttgccttctttgaacgttcatgagcctctcgttcataagcctctcagctttccttctttcttttcttctcatggtaatccaaacggtatccatagtgtttatggtgtaattcaatatattcgttctgtggcatggtgacaggcgcagaaccaccaggagtagcccctgaggtgcgaaaacactctcaattttaaggtctcagagactccacgcaggccgggacaggaaagggtcacccttttttaaaaatatttgtagtagagacagggtttcaccatgttggccaggctggccttgaactcctgaccgcaagtgatccgcccccctcaacctcccaaagtgctaggattacaggcgtgaaccacggccgatcattagcatttttaacacaaaatatattttaattaaggtagtcacattgtgttttttaaccataaaaacacttaatagactatagtattgtgtacacataacttttatatgcactgagaaaccaaaacaataataaataaccaggaacttgccttattgcagtggtctggaatcgtacctgcaatgtctccaaggtatgcctgtactaaaaggaaagtctaagattcaagaagggatgatggactgagcactgtggctcatgccttatagtcctagcactctggaaaaccaagatgaaaggatcttttgagctcaggagttcaagaacagcctgggcaaaatagagaaacctcatctctaataaaaattaaaaaaaaaaaaaaaagcctggcatgatgatgcaggcctgtagtcccagctacttgggagactgaggtgggaggatcacttgagcccaggagattcagtccgcagtgagctatgatggcgccactgcactccaccctggccaacagagggagaccctgtctcaaaaaaaaaagaaaaaaagaaaaagaaacgaagacgggatgatgagcaaataaaatggtaaacatggagtgaaatctaaatattgatgtcaaagacaagaaatatcagaaatataacaatgtctaattgataggaataaaatgaagatataatttaaatcctcagtaactatagtatataaattggaaggtaaggccaggcatggtggcccatgcctgtaatcccaacactttgggaggctgaggcgggtggatcacaaggtcaggagatcgagaccagcctggccaacatggtgaaaccccgtctctactaaaaatacaaaaattagctgggcgtggtggtgtgtgcctgtaatcccagctactgaggaggctgaggcaggagaattgcttgaacccaggaggtggaggttgcagtgagccgagatcgcgccactgcactccagcctgggtgacaaagtgagactgcgtctgaaaaaaaaaaaattagaaggtgaatatagtaattggagtttaagtgttctaaggtccttatattttctagggaaaaaattaaagatattgcttattagaagtctttatgttaagatttctaggctaatactaaaaaacttggtataatataacttccaaactagcagaggggaagaaaaatgaaaaggaaacacaaatgaaaatgatagaaaatgtgtcagttaaaaaaaaatttatggttgtgatatcgaagaaaataataaagattaccatttcttgagtagctcttgtattaatcactttgaatcattaatctttataatttcatgtaatatatgtcagaatgacaagcccaaagcaggtatttaaaaattatagtttctggccaggtgcagtggctcacacccataatcccagcactttgggaggcagaggtgggaggatcacttgagcccaggagtttgagaccagccgagaccacacagcaaaacgttgtctctacaaaaacatttgaaaattagccaggcatggtggcacacccctgtagtccacaaaggaggctgaggtgggaggatcacttgagcccagaggctgaggcttcagtgagttctgatcatgccactgcattccagcctgagtaacagagcaagaccctgtctcaaaaaataaaaataaaaattagctaggcatgtgggggaagcctgtagttctagctactggggaggctgaagcgggaagattgctccatccagcctggttggcagggtgagaccctgttgctaaaaaaaatatataaaaagctgggtgtggtggctcacgcctgtaattccagcactttgggaggccaaggcaggtggatcacaagatcaggagttcaagatcagcctggccaaaatggtgaaatcctgtctctactaaaaacacaaaaattagccgggcgtggtggcaggtgcctgtaatctcagctactcgggaggctgaggcaggagaatcgcttgaacctgggagctggaggttgcagtgagccaagattgtgccactgcactccagcctgggcggcagagcaagactccatctcaaaaaaaaaaaaaaaaaaagaaagaaagaaagaaagaaacttgtccaaggtcacagagcttggattccaatccaagtatttgaaattcaacccaagctacttttccctttaccatgtggtagattttttctctctaatgccaaaacatcatgtaacagccaagaccatgagttttttggacctgggtttatggtccagtttcaccacaagttaactgcagagctttaggcctcagttccttcagttgttgaaagaggataaaaatagctatcacaaaaggtagtaggttggaagatcgtgagaatgcacgccattggggtgagaatgtatcacttggggtggtggagataaaaaatgaggtcccagttcaatgtaacagccgatgaataggctcctagggagcagtaagaagagaacggaggtggggggtggggggaggcctgggcacagtggctcacgcctgtaattccagcactttgggagaccgaggtgggcagatcgtgaggtcaagagatcgagaccagcctggccaacatggtgaaaccccatctctgctgaaaatacaaaaattagctgggcatggtgtgagcacctgtaatcccagctacttgggaggctgaggcaggagaattgcttgaacctgggagacggaggttgcagtgagccaagatcgcaccactgcactccagcctagcaagggtgagactctgtctcaaaaaaataaataaataagaagaagagcacagggactgggcacggtggctcatgcctgtagtcccagcactttgggaggccgaggcaggcggatcacttgaggttaggagttcgagaccagcttggcaacatggtgaaaccctgtctctactaaaaatacaaaaattagccgggcatggtggggtggccctctagttccagctatttgggaggccgaggcaggagaattgcttgaacccaggaagcagaggttacagtgagctgagatcgcgccactgcactccagccagagcaacaagagagaaactttgtctaaaaaaaaaaaaaactttcccaaggtcaaatgggtagtgatctgggatttgggctgtctgtccacagagcttatgctcttaatctctgcaccatactttaagaggtgaatgatcactgagaaagagagctctcatgtctggaaagcacctcaaaggcaatattatgaaaaaagtgtggcttctgccaaagtcgggtttggattctggcttggcttcttactgtgtgagcctagacaaagtatttagccagttttctcctctgtaaaatgggagtgatacgacccatttcccaaggttgttgagaggatcaaatgagatactaatacagagtgatcaaaaagcctggagacttagttccccatcttgggtcaggaaagccttagctgtacctgctgtaaccaggtgcctgtgttctctgagctgatgatggggtgactttgggagaggagaggatgaacacagatgcctttctcctgctctttgaaaaggtgatttgtctaccctatgcccaccaccctcaatgcactcccaccattgtctcctaccacacacaagcatgctgcatggtattcagaaagcccagtctgtttctccacccctttgccttgtcactcagctttgccaggtcccttgagttctttgatgttgtgccaggctctgtgtgggctcccagccctgggcgtgtctgtggtgactgacctgtgccccactggcctccacctccattaccacaatggatctgaactctcggtgacagcagctgctggtccacatctggaatttagctctgctcttcccttctccacccttctcacctgtctataccaggatgactcttccatctgctcttcttccttctcctatttttatttatttattttactgtgataaaatatacagaacataaaatttgccatcttcacctttttttttttttgagatggagtctcactcagttgcccaggctggggtgcagtggcacgatctcactgcaagctctgcctccgggtttcacaccattctcctgcctcagcctcccgagtagctgggactgcaggtgcctgccaccacgcccgactaatttctttttgtatttttagtagagacagggtttcaccgtgttagccaggatggtctcgatctccggacctcatgatccacccgtctcagcctcccaaagtgttgggattacaggcatgagccaccgctcccagcttatcttaaccatttttaagtagaccgttcagtggtactaactacattcccagtgtaggtttcccatcaccatcatccatgtctagaacttctccttcatcccaaactgaaactctgtacccattaaacaataatgcccattccccactccatccagcctgtggtaacctccactctacttcctgtctctatgaatttgcctattctacatacttcatatgaatagaattatactgtatttgtttgtgtgtgtgtgactggcttatttcacttagcataatgttttcaaggttcatccgtgtggcagcatgtgtcagaacatccttccttgaataataattccattgtatggatgtgccacacttgtttgtccattcatctgcccatggaggccctccttttttaaatcacattttttgggtatatcataatttgcagtaatatgaagagaatagcctactctttccttgtagcaggaaactgaggagggtcactctcccagatagtggaaggcaggtggaattgagtgtgctgtttataaactctgtcctgaggttttactcttccagaggtctcttttctcgacaaatacttaatgcgcatgacatcacctgaacccagaagtgctagctagagagaagtgattatctggggccagaaccttgcatttgcttgccttcctagggaaagaccctattgttaaccctggagattccctcctttcaatgctgaaggcctttaaagggtctagagactgtagagcaacattttgtttcctgtttatattttttgggtttgtgtttgcttttgttttttgcatttcttccccttgtcagtctttgtccttcctggtcctgatgcacttcaatatttctggatgtgctgtactataatcataggccttcttaatatgggtgtatcctgtcttctttatttagaattctgcggactgggaattccctaagggaaagagccttcttcctttctttttctaatcttcctccacccttttttgttctcctcccttttgtacctccacaacacaccaggaggtgtaccgcctccatctagaccacaaactgtactctcagggtacccatggccaagaagaatgacacacacacacatcacacatacattcagcatgtctcactgttacctctgagaggaagtaggagaacctatattaatcctctgagctcatcaggacaggaatccccagctccaatgtcctgggttgggcctagaattatcccactattttctacaggctgctctctctctctctttttttttttttaagcaaggtcttgctctgtcaccatgctagagtgcagtggtgtgatcatagcttaccgcagcttcaaactcctgggctcaagcaatcttccctcctcagcctcctaagtagtggggactacaggcacatgctaccacacccagctaattttttattttttgtagagacggtgtctcactgtattgcccaggctggtctcaaactcctggcctcaagcgatcctcctgcctcggcctcctgagtctctgggattacaggcatgagccactgtgcccagcctcttctctccaatttcttttaggaccttgtagtatggagtatgccttagcttcttctaggctcttcctgtggttgcatggccttaactgagtgagtcacttcacctttaagaccatatgctctaaaatctgtcaaagaatgatattgtcagtcctgtctatcttaaaagattgttgcaaagatcaaatgtcagagtgctttgaaaactgtgaagcattatccacatgtgagttcttaacagagttcctttactctcatgaactctttctgtctttttacttagtcttgctgacaccacttaaaaaggaacctcagacagatagattccccagatatagctgcaaaaattagagattctggagaagtctgggaatggggagtaccaatgtcctcctggtacacagagccaagggtccagatccaggactggaaagtataggaacacggtggccagaggcacggggaggctctgacagaggggcaggagcagtttgcctccactgttcagtggcttcttaagatacttgatcttcatccaagggcaagggcctttgcacatgaaaaaagtaataatcctttcaactttggtatggggtagatgactttttgatccccatttttttagatgaggaaatgaaggctcagggagaatggatttggaggaggtttggctgagaggcactggtgctacttgggaaggacttcatgggagagcctgtgagctgtgaggggcaggagcctggcccgggtgcaggggccccacggggctggccactttgacatcttcagctctggctctggtgcatccccatgtcaaactggattcactactggttttcttccttagatatttttcaggatttggtgacccaagggaatgccaggttgacagttaactgcacctgctagtccttaaggtacttttattttattttattttatttttgagacagagtctcgctctgtcacccaggctggagtgcagtggcgcgatcttggctcactgcaagctccgcctcccgggttcacgccattctcctgcctcagcctcccgagtagctgggactacaggcgcctgccaccgcgcctggctaattttttgtgtttttagtagagatggactttcaccgtggtctcaatctcctgacctcgtgatctgcccacctcagcctcccaaagtgctgggattacaggcgtgagccaccgcacccggcccttaaggtacttttaaagattttagaaaggtgaatatagcccacaggagcaaggcccatctggcaaaacttagggtggatttcatctcccaaaccacctccttacctggtgcccatgttcagggcacatgctacctgactgtatgtagcagctctgaaaagagaaggttcccctctgctcagggtgagcccttagtgggaggcccacgctgtgatgagctctctcctgcagcagcttgatggccacaagctggcagcaggggaaaccctagaggttttgggtaggcacaggctagcaggcgtgggagatgtttctgcccttcctttgacacccaatacagatttctttgcctcaggtgtctctgcccctgtcctgctttcctgtcaagattgtgtagccttggccgggctcggtggctcacgcctgtaatcccaacactttgggaggccaagatgggcggatcacgaggtcaggagttcaagaccagcctggccaatatggtgaaaccctgtctctactaaaaatacaaaaattagccaggcacagtggtgcgtgcctgtagtcccaggtactcaggaggctgaggcaggagaatcacttgaacccgggaggcggaggttgcagtgagccgagattcacagcactgcactccagcctggtgacagagctagactccatctcaaaaaaaaaaaaaaaaattgtgtagcctttttatccagtgctcagcacaatattttgctaatacatgcttaaatgtaaaatgaggggatttgtttagacttttccatctacgtggctatgattatgggattcttgtttgatgtagttggtgggaaaagcagaggacatgctccctgaaaagaccaggaacttactggctagtattgttactggtgataaaattgtgacaggtctgacctgcctcctagcttgtggtcagcctacctgctttgagaaggtggtggagcatacgtggtaattaacctacagtggtgccacagttgctgcttctgggtagagcagagcggtgagcaactctgtctcctttccaagctggcaccagctcaggaggaagcatccaaggggattctcataagccacagagaactgcccatgagtatgaaagggaattcctgggccaggtggccacactcagctgacagctcctgctgggaggaatggtagcattttggtttcttacaatgttctccatctggctcctttgaaatgagagttgaaagggtcctgaccaggggacctgcaggaggtggacagcaaggcaggcctcaattctggaaacagcacctccacacatcacttctggggataattatctcatctgccctctttcaggcaaaactcagagtctttggagggccttcgctttcccaaagtagcttaattttggcccccgttcttcgtgcctcctaggttttgttgggtggacatttaacatagtagaaagctgactcctcttcctattaacctcctaggtttatctcaccatctgaatagggccttataatcctacaaatgaggcctctctccctatgctcaccaggaaaaattgaactctcaagactgtccattttctttgccctgttatggaaacttctcttccttttgccatatccccctcttatcttggctcttgaaactattcccttaggaagaaaaaggcagttcccttcctgcccttcttttgaaccaaacttctgtttgtggtcttggaaaccatgacaacctggcctaagaagccactttgaccatcttggaagttaatatttcagtgctgtgtactcacaattgtgagctctctagcacctttttgcttttgttttgtttcgttttaagatagggtctcactttgtcatccaggctggagtacagtggtgccatctccactcactgcaacctctgcgtcccaggttcaggagatcctcccacctcagcctccagagtagctgggactataggtgcgcaccaccatgcctggctaatttttgtatattttgtagagatggggtttcaccatgttgctccagctggtctcgaactcctggattcaagcaatctgcccacctcagcctcccacaatgcagggattacaggtgtgaatcattgtgccctgcctctagcacttttttccaaagggggacagaagcccgtgatctactgagaggagaaagtttcaaacaaagcaaccctagataatccttctacaagtacattagcaaaggagcaatgttccctgtaggttctagggagtggatatgggcagcattcgctggcagtctggagtaaggttctggagtgtggcctatacttatttttcctgtgctcttttcttctttcctcttctcacaattgctcagttactcagtagactagtgttggaggtagctatcttttcgcttacaccaacttttttttctttcttctcctcgatatgtttgtccttcttgctcgggtgctaccttttaaagcccaaagttgggaatccagggagctgcgatgattaactgcaggagcccagtggaagaattccacagccttagacggcaaagtttccatagcctcactgccgtgggacttcccccgcatgaaggcgagctctctttcttggtctggccattggaggagggagggaagacagcagcctggcgtgtcctcagcttctctgaggacttggctgcttacagagagagggcccagtgacaggaaccctaaagggaggaaagtgaccccctccccaccacactgaaaaagatccctctctggtgatgaagatcttgctaatttggaacagctggccagggtgtgttagactggaggaactgggggaaagcttgctctggcaatcttctgcagaaacaaatagcatgagatgcctatgaaagtttcactctgcttggataggatgtgtgatgctactcctcctctgcgaatccttgtgtagtggtggggaaagagagaagaaagcagcctgtcaccaggggttggattttagcatccatatgtctattccccaccatgctctgtaggctcagagtggaacggaggtggaacagtggagccatcttgcagcttgtagttgggtaggactagcttattgtgttcagttcttgagtggtcagcttctttgggaaccctgaaaggagccagggtcagattgtagtgcctttttaatctgtctagtcttctgcctccatcaagccactcccctatttatgctagattgggagcttggctgagcatactacatcctgactttggtgttttgttttgtttttttcattttttagatggctatagttactataactgacttttgtatttaatccatgggaatattctcctatccctccccttcccccacctagagtcctcagtgttaactgtttatctctacctccaatgtagttagttcccacataaatatttgacttagacaagcaagctccagatggactggggagaatgcagattggctcatggaatctggtcccacatgcctttgacccatcatccgtgaccccagtgacacagatgggtcctgggttggtgctggctgtggcagccccacaagtgcctgacttgcttttcagcacattcctgctccttccactgtgtgagccactgtggactaggacaggactgattggtttcagaaattatccaggcaaggatcaatccaattaggctgtccctggagatgtgggaaaagagaatgagagagattgagagattgaaatagacagatagattggggagaaggaggtaggggaagggatacacataagtatgggataataaagtcagaagtttgggaatgaggtatagagaaaaatggggaggtggaaatagtttggtgctaggtattcttcttatgatcttggtagcttagggctttagaaataaaataatctagaaaatatcttattttttcacttcctacaaacctccgaccaccatcccaccattcttccaggttttgccttggaggttgaagtggtgtttaaagtggtatgtataggagtttagaatcaactgggttgtgttcacctttgcctctccctagagagtagatggattccttcagtgatggctcattccccttctatctgcaccaaaacctctgtgactgtgtcctgcagatcaagggagatgtgccatcaaccattcattcagtctgccaattttaaggtgcaaagaatgtgggcagatggagcaagtgctgaaggagtggtgcctgggtcttactgattgtctctggagactggatccctttccaggactttttttggttgttgtttgttcgtttgtctgttttttgagatggagtctggctcttgttgcccaggctggagtgcgatggcgtgatctcggcttaccacaacctctgcctctcaggttcaagcgattctcctacctcagcctcccgtgtacctgggattacaggcacgtgccaccaccccctgctaatttttgtatatttagtagagacggagtttctccatattggtcaggctggtctcgaactcccgacctcaggtgatctgcccacctcagcctcccaaagcgctgggattacaggcgtgagccaccgttcctggcccctttctgggactttcatacttttccttcccttggaaacagaagcacactggatggaacagagagaggtggctcattcattaattgcacaggttaggccaggctctggagctgaggttgggatagagaggtgatgacacaacctttctgctcacttggaagaaaaatacacaatactctccactttctctcccctgagagacttccatcaacaatgaccagctggggctgagtcacctctttgcctgccctttgtctctttcaacaatgagccctgtgtccatcactgtggatgcgagccctttggaatagatgttctttctagtccatgagttttggaagctcactctaccttgggacactgaaatatgtctgcatctctctttgtctttttatgtattcccaagtaatggccactcggcttgagttcatactcttttttattttatcttttttttttttaattgagtctcactgtgtcacccaggcttggagtgcagtggcacgatctcagctcactgcaacctccatcttcccggttcaagtgattctcctgactcagcctcccaagtagctgggattacaggtgtgtgccaccacaggtggctaatttttgtatttttggtagagacggggtttcgccatgttggccagactggtctctaactcctgacctcaggtgacccacctgccttggcctcccacagtgttgggattacaggcgtgagccactgcgcccggccgagttcatactcttaacctaggaagagaagcacagcttatctggaaccttaattcatagttagtacttttccatcagcctacacccaacagtccaggactatacctttttcatctgtggactctttcctcacctctcccttctcccttcccaccctataggaactaggatgctgatgatagttggtttgacaggtttagaagtgatgcctgctctgctcttctgacctcaaggttctgccaagactgatttttatcccaagttctgatttctccaacaagagcttatgagctaaccagggctgtcagttaggactttaacctctcctggggcaccagaagggtgcttccctgatgggagcatcagtgtcttcccccttctcctgccctctctcctccccgtggggagtgttctcatctatatcctttctgagccatggtggcatctgggagacattcagttatcatatgagatgggaggaaatggaacagtctatgcaatttgctgtttttaacactgccctaactttatttttatctggttaatgtgtctgttggcagtaagaggtttttaatctcctaataagtgtataccaatccaaaagaagctggaataaggtggggagaaggggttgataaattcctgcagcatctttatattccaactagctgtttctgaaaggtgactctttctcttactcacatgttgtttagtgattgacgacctatagcatatttattagtcagttcacgctttcagctcagttgtgtgtatgtgagtgtgtgcatgcctgtgattaattaccacattgacttgtgactcccactttcttgaccttcattttttttctttattttgtttagataaaaaaaataagtctcactatgttgccaaggctgatctcaaactcctgagttcaagcaatcctccctcctcagcctcccaaagagcacgattataggcgtgagccaccgcacctgcctctcctgcccatcttgaaccacctatggcccttatttctcttcttctttgctattttatttttggttgagggagtcaaggcagagggccatagtacttccatcgaatagatgcagactgacctctgatcactccctaacccctcggccaaaaacctttcccacgtctctggtgcccgagacatatgtgtctagggaggaatcagctgcactgttactcatccatcagcatctgaaccttgcatgctgactctgtgatgctgactaagggtcctcaccaccttgactaaaatcttgggtcttgctatgcagaagtagcccttcaccccaaagctaaggagaaaggattggatgaaagttctctgtagaagtggaggaaacacgtgtctcctcagaggtacctctagaggttgttctctgcaaccctccagctagagtgagcaggctccttgcctgggtggcactgctacccacagaggggatgggggcttcgaagctctcctcccacgacacctggtgaatcctccatgtcttcctcccttgatagtggcagctggtgggggctggggggagggaggagtgctgctgttagagcaagaagacaaagtggctttgtctcttatccgtaatataagtgcagggaggtgagaagaccctggggtttggcgtttctccttgaggagctgagccagaggcagggctttggttcctaagtgattagaggcctgcatggccagaggccgcaccttcccttttggaaaggagctcacccacactccttgcttccatcttccccttcctggctcaagtcataggctctattttctggctatcctgtttttgttcctgagtaagttgcggtggctcttttttttttttttttttttttttttttttttaaagctgatttagggggttgggaaaagaaaactttaaaagtaaaataataaaaaacagaccactctgtcattacaggcacataaatagctttaccgtcgctgggctgcacactcgctttgccatagcaacctaaagcgactgtttataacagcttgtcaactggcctggaaaccagcagctgctgctggccgccctggcctcggagcagtgggcaggcgctccctgagaggtgttatggaggcggtgagcctggtgcttcttctggaaccgtgggggatggcaggggaacggcagcctgggttccagaggcaaccaggggcagtaatgttttgggagccaaagtgagcagcgaatgtcttttgtttttgttttcccctcatctgtgtatgggccccagcatcgctcatctcctgtggagatagaagacagggctgggaggggatttgctccactggaacctgaaaggggcctgggtgtccctctgaacctcacgaggtggcttgttttaacttttcgaatagaccttggcttctgttgtagcctgttgagtgacatcctctcaagtctgttttctcaaagactaaaaaaatgtgggctttttcagggctctgtctgggaaagggggctgcccagagataaatggaagcagagatcagcaacctggaaggactagcagagggagagggaagagtgaaggagacacatggcaagatcttcctgtgccttcccatgtcagcctggagctgaaggggttcatgggaatgctttggaacctcgcaacattttcaaagtgtggtccccagaccagatgcatcagctcaccctgttaaggaacttgttaggagtgcaccttcccaggccccacctccgttcttgtgcaccagaaactcaggagttggcagggaggggcccaataggtttgccccagttctccagaggatcctagtgctcactctgggtttgagaaccacagctctaaaacattactcaagtgcaaggaagcatgatcagttcgctttccaaaggcctaggctgactgaatggatcctgtctgtgcaatatgtgaacaaggaagaataaaacaggcgcagaggggtggcaggttattagcgatcattcctggccaccttttttaataagcactgtcttttcagcatggagccctcgctgatttgcctgtgacttccaggaaataagcccagagaaggctggaataggtaaagcggggatgggaggttctctgtactctgtacaggtgagactgtcagagtggagaaagggaatgggagcagccaggcctgatgaccagtatgggacatgctgactagtatctgggccacacaggaatgttgttttaagtcctctcctgctgagcgtctggggacagagcagctgcccctggtgctcccttttggtggatgagatgtggcctcctcagtctgtggccaggcaacttcttcccccttgtcctgaggactccaccagatcctgaggcctgggaacaaccaggtcccgacccggtagcccagggagatgacccctctccataagcatgacatgattctgctgaaattcgtttctaaaaataacctaggatccgatccagctgctaaaaagcccctttgttcccttgaaaccaaaatatggaaagccacagcagccccaagaaagacagtctgtgtagtccaagagagtgcatatacgaaatacttgaatgctgctgccggagggctgcgtcctgtctgtggcctagaagcttcctgccgcagctctgaggagtgagtagcagttatcgttgctaacccttatcctgagtgaacggggtcaggagaggctgccagtaccccttttgttaaacagaccttccagatggcattgtcacttccacctgaaggtggctcttgtcctccttaaacaactgaaggaaatggtgagcgctgctgtttcatcctctacatttttttgagctctagcttgctgtgaacacccctacctccaccccatacatcctctgagtcactggaggacacagaggtgacccaggccagtgtgactcacacaatttgaaagaggttggctttcccaaggctctgggcctaagggactgccctttctcatcttgataattttttttgagatggagttttactctgttacccaggctggaatgcagtggcacgatctcagctcactgcaacctctgcctccaaggttcaagtgattctcctgtctcagccttctgtgcagctgggatcacaggcgtgcaacaccacacctggctttttttttttttttttttttttttttttttttttctgagatggggtctcactgtgtctcccaggctggagtgcaatggcacagtcttggctcactgcaacctccatctcccgggttcaagcaactcttctgcctcagcctcctgagtagctgggactacaggcacgtgccaccacacctggctaattttttgtatttttagtagagacggggtttcaccatgttagccaggatggaatttttatatttttagtagagacggggtttcgccatgttggccaggctggtctcaaactcctgacctcaggtgatctgcccaccttggcctcccaaagtgctgggattacaggcatgagccactgcgcctggcctcatcttaataatactgatgccatttcaagatggagccagtggccaggggtcagggggacagccgtgccctcccaggcacattcctgcttcctcccaccacactgtttccctacccatgccctggagctttctgtcttcatcttggtggttcttaaaacctgtgacatgggttggatcttagcagaccaggtgatcaggatcaggctgtcaaccttgggtcaattcttggtatcgctgtttggagaaagcttttgtcatctatgggtcctaccttctccctgccttctgaaggcatctgaccagaactggtaagttttgccaccattatcactgcacagcatatcctagacaacacagccactccaagactgagaggtattttatttttattttttggatctcagatcaccacagataatgttccagtgaacatccttgcacatgccccctccaggccctggatgaggatttctttggaagatgtagccaggactagatgactgggtccacagcatgcatagatgtagtttgaccaaaaagcaccaagtgattctggggaggagggatgaattctggattcctgagacccaggggctacgagtgacacgttttctccgattagatgctttgactctagtactaccttttttggtggaattgaagaaggtgctgtcagagtagcagacttggagagggggaagtaagtgagggaggcccgtggataccacctcctaaccaggaagtggcgttctatcttcagaaagagagaactgagcctgcgagtgacatcctctcaagtctgttttctcaaaaactaaaaggatgtgggctttccttgggtctctgggaaagggggctgtcctgagatgactggaagcagagactagcaacctggaaggactataggggggagagggaagagcaaaggagacatgaaccagaacccagaacttcaggaagggagtaccccacccccaggaggctaagttctaggggctagctgaaaattagcatcagattccctgaccaggccatggtatactatcccatggtgaggccagaggcctggcttggtgtgcccgccctcacctggcttcctggcttgggtgtggctgtcggatgatgatgacaagtggtcccacccgccacctgaactttagccaacacctgctgcctctgaccttgttcccatgcctccaaagggcctcagtaggctgaaggagggcatgtgctctagtctgcttctgcaaaccagttggcatttaaggagcaattagggcagggcagacatggggaggggaggaagaacccgggattgtgatgaggatggctgccagacctgagggattggaagtggccagggtgaactagaatctgggtcatggaaataaggagcctgtgataaggaggcgggcagaacagcctctgcctgagattcacacctccggagagaagggctagccagggatgttttaggctaggcagcctaccatggtcaggttcttgccagctttcttgatagggcactgtcctttggaagcgtaagagtgccagagagaaggagtagagcttaaaccccccaaggtggtgcacaggaaacagccctgctggaaacaagagagagaatgcagagcaggttctccctctgtgcttctcccagatcaccagggggagcaaggccaagagcatgagacgactgagtggaggaagccctcatccccaccactgggctctccaggcaggaattggatatgcttggactcacagcaatctagagcccagtgctttctggcttggggtgggggtggggtgaggggaggggaggacaagggggaagggagggtgtctgctcccaaaaagctttgagtctatccctatgccttcccagaaagtttacaagaggtagatatttccctgacctatttcagtgcctttaggagtcaggaacaagggacagatgggtttatgtgagccttctcatcaaggtttaggaagtaagctcatagtttgtttacattttttttatatcattgttcttgcacttgaggcaagttggctttgaattcagattagggcacaaatctggctctctgaatctatatttccctgctataagaaggagaggtccttcttatagggttgttggtgagaattcaatgaaacagtgtatgtaagaatgataatagctacagtgtgtggaccagccactatgccaggcactacataatacataggggtatgtacataatttctaattttcatatgaagtacctagtatgactcctagcacatggtaggtgctcaacaaatatttttttcccaaccttcccacctctcccaatcccacatccctgttcctgagtatagggagaagtagagcctcgcttggaatgagggagactgactctaggtcagaaaaaagactacgggttttctgagggactcctaaagcaggttttgtttgtttgtttctgaagcagagtctcgctgtcacccaggcgggagtgcagtggcacgatcttggctcactgtagcctctgcctcccaggttcaagtgattctcctgtctcagcctcccaagtagttgggattacaggcattcaccaccatgcccagctaattttttctgtttttagtagagacagggtttcaccttgttggccaggctagtctcaaactcctgacctcaggtgatccgcccacctcggcctcccaaagtgctgggattacaagcatgagccaccgcacccggccctgaagcaggttttatattgtagctgggtgcattctaaagtgggaccaggctgcttcccctctccagaggtcttcccttcctcactcatcaagtcctgcctggcagtgatgctggcacccctgccagagtatctccaagtgctaccggcttgctcctgagcagaggctctcagcccatcggggaaggacagagtagggcagggcagggaagtgtctgctccactgagcagcccctgcctgtagcccagaagccagagttgaccagagcctcttattattccaggcaggtctgtctgcagtgctgcagcagcctgaagccctagccccgggcccctcctgtttcctttctcccatttttatgcatcacatcacattcaataggagcatttagtagcggggagactcagggggtgagttcctttcatattttcaaatataccctactctataacctatacaaggtatcactctttttcctcatagtttggggatgtatttcttctttagcagcctgggaaagctaaaagtaaaagattccttggacaaaattggaggaaagtgtgtctgactagtgtttacactttggtgacttaggttcttgtctctggcagctcctcatttctagaggcttttttttttttttttttttgaagtcagggtcccacttggtttgcccaggctgaaactaagtgatatgaacacagctcactgcacactgcagcttccacctcccaggctcaaatgaccctcccacctcagcctcccaacttgctaggaccacaggtgtgcgccatcatgcccagctaatttttgtattttttgtagagacagggtttcaccgtgttacctaggctggtatcgaactcctgagttcaagcgattctcccgcctcagccttccaaagtgctgggattacaggcaggagccacggcacctggcagatgcctgccttttaaagggcctcttagaagcttgccagaaaatgaggaggtttaggctcaagagaaggagcaaagtgtaacaaaaagagcaccaggcagtcaagaccactgacttgctaagaccaaaccacttttttatctccctgtacctttgtatcttcatctgtaaggtgggggtcacagctgtcctaactagaattgatatgaccaatgctttcacacgtcatctacaaattatagaacagatgttataggaatttaggaggaaaaaagtaaaatgtcttaatgatcatgtaaagcattatgatttcttgccctaggaggaagagatgagagagttagctcttctatcctatcatctcttaggcttgcaaaatattagaaaagaggagggagcacataccttaccgagaatgccccaagccgaatgactaacccttacctgaaaagaggtagtacctttcaggtgtctgagcagttcatttgatgctgaggtggtgtgagcaccttcagattattctttggcagttgcctaatcagattaggggccaggcaagctcagcagttgcagagaactcatactccggagagttcaaaactcagacagaagtggggacgtcatgatatgtttcctagtattatagcgatcccaccttaaacctcaggccccaactctgcactgcccttttgactttgtgccagcagcttagcgcttgacctactctgtgtttctctagataagcctgaggcaaacaaatcttttcattcttttccacatgtgttcttcagccccatgtgttctaatcttatgcgaccttttccatcagttgcctatggaagtggaagaatctctccgctttggtactgtgaaaagaggttcaaagtaaggaaggaattctgccaggcgcagtagttcacgcctctaatcctagcactttgggaggccgaggggggtggatcacaaggtcaagagatcgagaccatcctggccaacatggtgaaatcccatctctactaaaatacaaaaattagctgggcatggtggcatgcgactgtagtctcagctacttgggagactgaggcaggagaatcacttgaacccaggaggcagaggttgcaatgagctgagattgcgccactgcactccagcctggcaacagagcgaggctccatctcaaaaacaaacaaacaaaaaaaacacaaaatattagctgggcatggtggcaggtgcctatgatcccagttactcaggaagctgaggcgggagaatcacttgaacctgggaggcggaggttgcagtgagccaagatcgcacgactgcattccggcctgggtgacagagtgagactctttctcaaaaaaaaaaaaaaaaaaaaggaaggaattctgactcagactgtcttttctaattctcaagagacccaagaccctatatgctggtggttattgctaatggttataacctagctaatggttattgttaatgaagctgccttagaattttccattcttttggtggggtgggggttccctggcaaggaaagatggaagggcacatggagcttattgttcttcttctacttaaagggcttaataacaaaagttcattaagatcaaattaggcggctgggcgcggtggctcatgcctgaatcccagcactttgggaggccgaggcgtgcggatcacgaggtcaggagaccaagaccatcctggctaacacggtgaaaccccgtctccactaaaaatacaaaaaattagccgggtgtggtggtgggcgcctgtggtcccagccactcgggaggctgaggcaggagaatggcgtgaacccgggaggtggagcttgccgtgagctgagatcgcgccactgcactccagcctgggcgacagagtgagactccgtctcaaaaaaaaaagaaaaaaaagatcaaattaggctttctcccatcacttaagtgtcctattccagacactggatacctttcatctaagatttccaagcactatttctataattccattcctttatcactttcttagggtggtgcgaaaagacagggcccattctctacccaactaaaggtggaaggaactgagtcctgagaaggctaagtaacatccctgtcttcatgaagcaaacattgtagtgggtgaagacagaaaaggtaaaatcctctgattcctagttcaacactctatcagcattgttcccaacatcctcttgaaaggttaaggagttctacttaagggtcaagttgggtttcttgctactttagcccttcccacttcttccaggcttggaggagaagctgaactggggtgaaaactctgtggtcctgcctgtgcctataccagtctgaatgaagggagtttgacacattgcctcaggttctttgtggatcttcttgtttcccagataagaagggagtacgatattttaaaaacaaatagagccctgctttcttaactctttgtaagtcagagtagtgctaaaaatctatgtggcgaggaggacgcaaagggcaaattgggagagggaggagtataaatcaacctgcatccctgtggaagcttctgggaagaggattgtcaggaatcggcaaagactttggctacatgtgactttggaggagatcattgataaaagaatcaagtcccttatctgatggttcttgtgcttctttgttcaccttctagaagtaagtgtggcatctatttattacagagaggttggccagagctccttgccaccccctggtaactgaagtcgtcagtggggactacgtaaccggggctggggtcccatgttctggtgctgtgctaagagtcccttcacatttaaaaggctgatgtgtggcagtgacacctgtcagtggcatgacacacagcggccccactctgaaactgagaaggggcctcaggataagttctcttcccaccttcagccctccgttttgtcacctacaccacaccccctagttagcatgcgtgagaggtaatgcatctttctgaggggagaaatgctggcctctctctggtgcctttattgagctgatgtgagactctggtgctcactcacaggctagcttgtctcccttgctaaccttgctgtggccctatcctctatctgaattgagaggtatcttaccgctcccactccagagaaactttaatgctcaggcttcaaactccctatctttcctcctcagaggtccttctgtcccctttactagaaaaaaaaaaaagttcaccctgcgtcaccaactgccaaagcattttactctcctcttctccccaaaagcctcttggaggagggtggagcttagcctcagaacaaaacttggtgccggccaggttgacacctgcacgggctgcagaatttccgtacacctggaggctgagtactctaacgggctttggaggattttgacatcttctatcaagttgtcatttccatacacctggaggctgagtactctaaggggctttggaagattttgacatcttctatcaagttgtcttccttgtgtgtaaatgtgtgtgttgggagtgggaagagtgtgggttgtgggagaggaaggcagactgacaggccacccttcagatcacttagatctgaactcctttttctgacctcttctcatcttttatagataaggtcagactaaaggatcctgtcacaggtccctcaaatagacagggaaaacattagagccatcagaggtcgtaaccatttatttccaagtttctgaagctgtgggttttatgttgcttggttgggagaggtgagacgtgaagactcgggtattgaaattactcctctacattggagtttacaggctgcaggggcctcccaggaaggaacgggcctctcttgagtcagctctctaagctcaggcctagctatcagttcagctcagatctcaactgtcacttaaacccttgtgcttagactgggtacctcttgcccttgcagatgctggatacttatggctgctctaatggtttctttttgtctatctttgaacctttattccagagatccagttgtcatcggtatccaggaagctctcctcttcctcctcctgacgtctactactacagttgctggttgttgctaaggttgctgccatggtaacatgcacatcctgtttacaccttcatctgggcaagttggtctaagctaggaacctacctaccctggacaactactatcatcaccacctggggacaccaatcatcgtgacacggagtccaccttccactcagttcccccatcctcttcctcctctcgctgccagacttcatacggaagaaaggatctagacttcggacggctactcgggagcttattgcacaagatatattcaatctattccctcactgggcccccagagaagcaagaagtaggaagaagttgagacagggaggcaggagacactggtcagttgaagggaaacgctacatcttctctggttgaggggcttggtaacagcaggcaaaatgacgaacccatcagaccgtgtcttgcctgccaactcgatggccgagagccgtgaaggggactttggctgcacagtaatggaactgaggaagctcatggagctgcgttcaagggatgcactgacccagattaatgtccactatggaggtgtacagaatctctgcagtagactgaaaacctcccctgtggaaggtaaaggccatatcaggggtggggagttggaggaaggtggctagtgtttcaaaatattgttttcccagcttctagagaaggcacatttctggaggcccagctggtatatttttgtctggtgggaaaggtatggcatctgaagcactgaaaggagggcaggccatgaagaactgtatctttcccagagatgatgtttagaaagtgtgctattctctaaagattattcttttctcctttttcttttctttctttcttcttcttttgtttcttttttttttttttttttttttggtgagacagggtcctgctcttttacccaggctggagtgcagtggcgtgatcatggctcactgcagcctcaacctcctgggctgaagccatcttcctacctcagtctgctgggtagctaggaccacaggtgtgtgccatcacacccagctagctttttagatttttttgtagagttgaggtctcagtatcttgcctagactcatctcaaactcctggacttaagtgattcttccaccttggcctcccaaagtgttgggattacaggcacagtgagccactgctcctgacccctcttttctcctttttctgtatcagtgtccagaaaggaggatatttatttttaaaatgtttatgttataaatgttgttgtcagtaaataatcaagtctgttcttctatatgtctgattataaaataatttaattcttccctacactgatcttacagtttaatgaatggaggaaggaagggtacaaaaaagtgaataagtccagctgcccaattgagcacttctctattgtatactgttagaaatgggatgataggccaagcaggtgggtggctcacatctctaatcccagcattttggcaggctgaggtgagaggatcacttgagcccaggagttccagaccagcctgggtgacataataacaccccatctctatttttttttttttttttttggagacagagtcttgctgtgtcacccaggctggagtgcagtggaatgatcttagctaactgcaacctccgcctcccaggttcaagcaattctcatgcctcagcctcctaggcagttgggactacaggtgtgtgcaccaccacgcccagctaattttttgtattttagtagagatgggatttcaccctgtgggtcaggctggtctcgaactcctgacctcaggtgatctgcctgccttggcctcccaaagtgttgggatgaggaggcttacaggcataagccaccacgcccagcctctattttaaataaaaagaaaaaaaaaaggaaatgggatgctaaatcacaaggtatataactgtacccatcatatctttggatcactcactgttttgtgtcagggaattataagtgattttttttcaactctgctggatacacttttaatgtagttctccttaatcttttttgtttgttttgttttttgtttttttggtttttttgttttgagaaggagtctcactcttgttgcccaggcaggctggagtgcaatggtgcaatcttggctcactgcaacctccacctcctggattcaagcaattatcctgcttcagcctcctgagtagctggggttacaggcatgtggctaattttgtatttttagtagagatggagtttcaccattttgaccacactggtctcaaactcctgacctcaggtgatccgctcacctcaacctcccaaagtgctgggattacaggtatgagccactgcgcccggccttaatctcttcttaaaagctaaaaaaacttaaaagataatgaaaaattcagcttcaggctttggcccagcccagttgcccagtgtgccatggtattatgaaattttgcctcatcaaaatgtagaaagaacaaaaggaaacttgctttttcactttagtctggttttagcatctctgtagcagattcttacttggccctatacatctggcagttcatggttgagtagcatgagatggagcaaagatcttgtccattaggggctttcagtctcatgtggtctcctatttctgaatcttcctcagaggccacagcatatttctcaccaattctaagaagttgttaccctttgccagtgctgtattataagttagtgacttggagcctagactctttaggatgaaaaaagagaaagagagttttacatagatatctatacctagtttatgtcttattttctttacaacctaagggagcttccctacctgttttctttacttctagaatttggtttcctatctcataggctttgagttcaaatgatagctccaccatttactaactaagtagccctctacagtttactcagcctccctgagtctgtttcttctttgaaaataatgttaataacacctagcccatagagttactgagattaaataatacatatacagtgctcatacttataattaggtgttcaatagattagttttctcagattaaaacagagtccatgcatctgtagatacttgccagaacatgggtgcctatggagtgcaatgttttgtcctatctggagaggttactgtgtgtgtaactgcaactactgtccatttcatttgctcacttcttaatcacaaaaaaaaaaaaaaccctgggtaaggtggcaatatctaattgctttcatgtggctcagtctttgccttctaatggtagtccttaatcatacccctttgggctctgtctacttcttgccagctagatttctttattcagtcacttttacagccgtactgactgctgagggtctgttcttaattatatcttcactgagattatgcagtactttacaaacacccatcagaatttaaacaggatctttctttttcccttcctatgctgttcttgatccctctggtcagctgtctgtctcacaaacaggaactcgggagtccaaagaagctggaacctagagaactcctgacagcaggattcaggctttcctccaattttccagatcccttcccagagctgccactgtttactttctgattcccagagagcttcctttcccaaaggccaacatatattctactttctgtcaacattggatatcaaatgttatagacatagctaatgctcttggatcctttcccagtcctggtttcagccccttccaatggcaagtgcttccctcgttacagcccctggccatgcctgtagcctaggactcctaacactggcacaattttctactgccatgtactgcttccttagatcacaaatatgtgtcctggtgtttttctttcttttctttcttttttttttttttttttttttttttagaaggagttttgcttttgttgcccaagctggagtgtaatggcgcgatattggctcactacaacctccgcctcctgggttcaagcaattctcctgcttcagactcccaagtagctaggattacaggtgcacgccaccactcccagctagttttttgtatttttagtagagacggggtttcatcatgttggccaggctggtctcgaactcctgacctcaggtgatccatccacctcggcctaccaaagtgctgggattacaggcgtgagccatggcatctggccttttttttttttttttttttctttatgagagatggggtcttgctctgttgcccagactggtctcaaactcctggactcaagcagttcttctgcctcaccagtttgtagtaatgtaagagttaccatagggcttgttctggaactggggagacggtgttggaaaacaacctttccattagtaatttttagtccccagtaccaacagtgacgtcctagtgtgtaagaagaataaagagataagaaaaggagaaaaaaataagaaagaaaaagaaagaaaagaaagaaaagaaaggaagaaagaaagaaaaaaaagaaaagaaaagaagatatagaacagctaagacataggagtatctacccaggcaagggtaatgctcacctgtttagttagggtaggcagacaaaagatccccaatatgctcatcctataaaaagccagcctgttcatggaaggccacacagcctgacagcctaggagaattttgtcattgtgggaggtcccagtggaccaataataagaataaagaaatgtacctggtgcttgaattctgctagctggaaaccaaggtgaaagtgaagatcagagatattgtttcctaaaatataacccttttcctttattttctatggactgatagcatctttagtatagattgacagaatttttttttaaaccatagcttttaagggggcttatggaacttgaagtttattacatttctgatactaacatggttttattatcatagatttacacaattctaaaggcaggtgggacttaattatctcttttggctggccgcagtagctcatgcatgtagtcccagcactatctgtgctttagctaagatactctgtgagactgctctagcataagaagcatttagagcattaatggagtataagtcagaaggcatgaaatattccatcccattctacctggtggtaagaacttaggtcatttaaaccctttagcctggagagagggagagagaaagagattattattattattattattattattattattattattattattttgggatggattctcactctgtcacccaggctggagtgcagtggcatgatctcggctcactgcaacctccgcctcccaggctcaactgatcctcctgcctcagccttccaagtagctgggaccacagatgcgcgccaccatgccgggttaatttttgtattttttggtggagatggggttttgccacctctacctcagcctcccgaagtgctgggattacaggcatgagccgccactgacccaatgtttttttgttgttgttttcaattttatttttgaaacagggtcttgctctgtcaccgaggctggagtgcagtggtgaaatcatggctcactgcaacctccacttaccaggctcaagcagtcctcccaccttagcctcctggttaactgggactacaggtgtgcaccaccacgcccagctaatttttgtatttttttttgtagagacagggtctctccatgttgcccagggtggtcctgaactcctggcctcaagcgatctgcccaccttggccccccaaagtgctaggattacaggcatgagccctcatgcgcagcctcagcccaatgttttgatactggcttgtgttccttgagtatacattagctagttagagtaagaggagttgccccagtggccaagagttggttagacttaagaaggcttggagatgtttagctacatggccttcagcaacaaccagaaataaggctgagagcatgagccaaaaagagaagaaaatttagggcaacaagaaagggtgggggagacataaaagagaatacatgtttacatcaaagtaactaaagatttcagtctttatgtctgtatataaacaaaagcaaagatgcaggggtgagactggagctcctgggcaagctgtgttgccttgggtttatcaggagggacaatctgagcattttgcacaatggaatccttcttgtttgcttgcttcgttccccattccagttttttccccctccttttattgtctcttctttccctgtcccattcccacctcaaccaatctttccaatccccaaagaacagagcagtttggttggtataggctagaagatagccttttaccttctgtgtggtttcctgtggagtctcatggcctcgtgagtggaagaagctttttgtgaatctgggatgaaaattacctgtggcttaaggggaagaaggaagaggtattttccttagtctcaatacccttttgtgtgaaggaaaaagggatggtcctggcggcctaggtagaggttatacgtgttcttttttccctgtagaattttgcacattggtccttagctacgctatcctttttaggaggaagaatggtgttttctgaggaagagttaggccagcccttggaggcaaggtctgggcccagaacagaatgggaaacaaggggagccttgaataaacagcaaattattaactgtaggccttctttcaaaaggctgaaggctattttggttgaatttggatctaaaagattgttggtggaactttctgttttatgttccttctgtacccttctacttcttttctcctctgcagagttgaaggcgtgacagtgagatattgagggcctccaattctttttcaacaacattcaactaatacttaaaaactgctaggtgctagggacacaagggtgaacatgacaggtgcagtgcctccttccatagagcttacaggctaaaagaagatgcatatgaatgaaggcaatttcagaaatcttgccatagggcttcgatgaggaagagcagcgtctatgggaacacagtgtagggacctaagctgaaggcattgcaggggaggggaagggggcttagagctggagacagcacacctgtatcatttagggattacccagtgaagctctagcatggccacgctctatgatcattgctaccacctgctgaatattcctggcataagatgccagcatttttgccttccttaattactgggtagttactaggtttagggagctgagattccttggggagtaagtggcaggcgggaaaaaaaatgtgttttaagacggccaacccaaattacaattttgttttattagcttgaggatttagatgaacgtctatcaccttaagatctctggggcttaactgtgttcccgtcactgtgccttttgagggcagtggcatgttttaccaggaattgtccattttgctacaagctgagatgtactgggattgggctcttcctcggtgtagcagattgaaatttctagtagtattgtcaatctggaaaaaattgagtacatatcccaagtaaatgttcacctacaagactattgccttactattaatacatctaacacttttatttacataataagataggcaaacatatattttcctcactctaacagatggatgcatgccccccgcttagagaccgctgctctaaagcacggtggcgttagggggatgtggaggactaggtgagtgaagatgggatggaacagatgtgagaggaagatgggcaactgggttctttgagatttttcttccctatctttagagcttatagtctgttctggaatatcaatttttaggagctcctccacttgaggttagaagcataacctctattttcctctttctttgtgccctctgccctgtagccatcatctcttgccccaactctactaaggatggcaaataagtgaccctaataacagtgatctgggcatggcctcagagattaacattctgtggtccactctgcctaccaaattttgggcagatggattagcactaactaattcacgatgtgagaaggactcaagccaaaagtgtcctccctctgcccctccccatcccccaccacagggaactccactttgcatcctaggaattccctgtctggtttgagtttcatgcctagggctgaattaggcttcttgtaggctgtgggttctctcttcctagcccagcccaggctctgccagttcttttctacttagccctccttgcctagagctgggcttctgggttcactgtcataatgctgtccagctggggtcagagggatcttcacgaggagagtagctaaggcttccccaacctggaagcaggaggcttccccttcctgctttctctcctggagccctttatgctccattcctttgacaactcagcagcaactgttgcaagttttttgggggtctgatttggtttttaaccttctcattcttggcttacattggaccattagctgttgggaagaaaaatagcattccctccttgggtgaagcagatactgcatctaccgaaagtggggctttcattcttattatttagctccaaggtgggaatatgacaccagatggaagcacattcatgaagtacagaaggtggcagagtggcagagcagaaagctaactagagagctctagggagacttttttccctgggccacagttgctgttttcaaaaaaaggccaagagcagggggcgggataaagggaagcatgccctgaggaagcggcccaccttgggaagggttttgctgaccagaatgagaaaagaagcattgttctccaagttcatcatcctctggctgtgaccttgaatcaactgctttatctctaggagctggaagtctagcagatagggagcaaatctccaagccatgcgtgtattaaactggaggtgctgaagcagggaaactgctgtatactcggaagagtagcattcggttattagccagagatggctagatcttgcatggccctattttgattttaagttactcctccccctcagtccccaaatccagggttgttggggttttttaaaattaattttaactttttttttttgagatggagtctggctctgttgcccaggctggagtgcagtggcgcaatctcagctcactgcaagctccgcctcccgtgttcacaccattctcctgcctcagcctcccgagtagctgggactacaggcgcccgccaccacacccagctaatttttgtatttttagtagagacggggtttcactgtgttagccaggatggtctcgatctcctgacctcatgatccgcccgcctcggcctcccaaagtgctgggattgcaggcgtgagccaccacacccggccttttttttctttttttgagacagggtcttgctctgttgcccaggctggaatgtagtggcaaaatcacggcttactgtagcctcaacctcctgggctgaggccatcctcctgcctcaacctcctgagtagctgggaccacaggcacacgccatcatgtccagctaattttttttattatttgtagagacagaatctttccgtattgccccggctggtctcgaactcctgagctcaagctatcctcccaccttggcctcccaaaattctgggattacaggcatgagccaccaaacaaaacccaaatccttttaaggaaggacttaaaaggtattctgctgtctgtccttctcaagttccaaaagaggacagccttcaaatcaacccagagaaaattctccctggtactatatgagtgggagaagattctgctgcctcctttggcaaggtgtcataactcagacagctgggaagtccctcctgatgtctaccctagccccaccctttctggggctgagctggttctgataagtagtgcctctgccgatgtcgttggcccttccctgctggagctaagccactgagggttgggctgcatttctcctcccaggccctaggtcctgcacactcatggcagacacaaatattccactgctgtttattctatgttcccacccagcctgggcaggggccgtgcacctccccagcatggggtgggggtgatgacttcacagctaaacattctctttgcctctcccagctcatgtgttcagtctggttcatagggccagaagtactcccactctgggtggggctttctctctcatgttcttgaggacaagatttcccctcagtttcctgaggaatttctaggggaaacccttttcctgtgtttccagcattctctccctgccaagttttccttcccctctccaggaggttgtgtgagcatctgagaaaccactgcagagatcagggccttttagagccttttcccaggctggacaagtatttgtgtgaaattacagctgctgagatcagggcctgaaagactctctagggcagaaagaattggaatggaaagcccaaaactggggattggccgagctcccagtcccacatggctttcccatgcctcaccacatgtcagagaggattcccaaggctactacagctaagagccttgacctgccccgccttgctgcagggcatactgggaactgagacagccacttgacttcttaaggttgctattgtacaagctcagggtgacttaaggtggaacacatagatgagtagaaaatggcaaaaaaaagaagcaagcaagtgactttgagagcatttaggtaagaacaagccctgactttttatgttttccatagtgtatgtcacttcatttgcttgggtccaaaaaaggccataagaaaggttttattgagtacaaaattcataggtttggactctgatgaacctgatggcgatgttaccatccctgaggccaggaagaaaaaagacaggactaatccaccccaattgtagacagtgggaacagcgctggcttgcttagaggtacagaggaaagcagcatgcaaccctgccccgtggtgaaggaagtagggtggccaaccatcccggtttgcccgggactgagcggggttcccaggaggcagaaacttcagtgctaaaacctggcaagtcctaggcaaaccaggacaagttagtcacactagattgaagcctcagctgagtgcagctgcctccatgtcccagcgtcctctgtatctaggttggcatccagtggccctctgtggggtggcatagactctgccacttaataagctcaagtagtcatacccctgccaggccttagtttgcttctatgtcaaattgggttaatagtagctaccaggtaggggtttgtgatgcttgaatgagaaggcatgaatgtgcctggtgaggcatctggcacatagtaatcacttaaatgttagcaatcttagttatcactcattcattcagttcattctacaaatttgtgtgtgtacaatgtgctgggcaatgctgtaggcctgaggaacaaagataaaaatcctgcccttgtggaggaggtggacaaacaataaatgaatgtgtcctattatatgctaggtgagaagacctgtggagggaaatgattgagcaggatgagggggatcaagagtgccaggtaaatacagtggtcagggtaggcctcactaaaaagaagatgtttgtacaaagacctgagggaggtgaggaagtgagccctctccaacaaagaggaatctgggcagagggaacagcttgtgcagaggccctgatgtagatgcctgtctagtgcgtttagagaacagcaggcaggctggttgggccagatctcagtgaacatggagaaactagtaggagataaggactggggggctgggggagtcataagggtcctggaagcccatcattaagtccttggtgcctagttttactctaagtaaaagccagagggttttgagcagatgaatcgcatgtactgccttggatcttaaaaaagatcattctggctaatacattgagaagagactaagaacaggagagggagggtggaggcaaggagaccagttagaagatgattgctataatccagatgagagaggatggtttagaccaggatgataacagtgaaaatggaaagtgattggactttagatatattttgaagctgataggatttctcaactacatgatataggagatgggggctgggcatcaaagatgattacagggtattagcatgagagcagagagggacaggtagccctgttctctgcccctcatatgtccctctttttgggagggagggtttcattaggctattggggtgcaccttatgatctttaatatctgatgtcttggtttgccctcataatcatctactaaaccttggtaagaaggaaagggcatctactccctttacattgtgaatcctgcttttttgagaagcgtcccaggtagcttaacaaattaccagcactcctgccagcaagcctggctctccagcacagcagacccaacttggcacagccttgccatctctggtccctggggagaaaggaccagcaaggccctgcccctttggcaagtctgcctctgcctgtctggggctaaagattccctgcccagaacactcctttcccaggctctggctttccctcctactgggaacctgacttctcaggctggtggggcagggagtctctggggagcaacccaatttgcttctagaggtttggccaaacctcacagctctgcggggctcagctgtgcccctaagctggaggccagggtgatgtgcttgggcactgggagtcaggagaccctggataagccatcaggcaccacttccctaaccagcccctgtgtctctctcctaagcactagcaagtgaatgtggtctcaaaagagggccctcacacccctaactgcataggtgtggatgctagttcatcccctgcccccccactttcatctcccaccccccacatctaccttcccagacagatgagtatcttatgtatgtctcctgatgctttttgttttataggatagggaaatggaggccatcccaaactctgcaaataatgctcccttgggtacctattttcccattttcaaaatctttatctgttcagatgtcttcctcaggtcctaacccaaatctctccttttgacatttaaggtaacactcctgggttcttttttgagacagagtctctctctcgcccaggctggagtgcagttgcatgatctcagctcactgcaacctctgcctcccagattgcaattctcttgcctcagcctccctagtagctgggattacaggcatgcgccaccacacccagctaatttttttgtatttttagtagagatgaggtttcaccgtgttggccaggctggtttcaaactcctgacctcaagtgatacacccaccttggcctcccaaagtgctgggattacaggcatgagccaccacgcccggcccactcttgggttctattcagtgaagattttcagtgaagagtagacatttgcctgtataccacgtctgcattccttcctcagcaacagaatagcccttcacattgactaaagtgtaaagaaggcctctggcatccaagtcctttgcctccgttttgtccctgcagcctccatcatccacttcttgttctctctgtgaagctcagttgaagttcccttcctctgattctgaccctcctcagctgctaaccttttttcaagacaaaagtcaccctaccctgcctctgggaaacccttcaaaccggcaaccaacagcttccagtgccaaaaccaggactaatttgcctcagcgtgtaaacaacttgaacaccaactggcattaatcaccatggtaggattgcccctcttcccttcaagggtagccccacctggggacccatgaaaggacccaaatataaggaaagcactgagaataattctgcctatctcttgtccctctgggaaagtgcgtagagagtaggtgtggtatgtatgtggtgcatgttctgtgtgtgtgtgtgtcatatatctgtgtggtatgtattgtgtatgtggtttgtgtttggtgtgtatgtgtctgtatattgtgtataaggtgtgtgatgtgagtggtgtatgtggtttgtggtgtgtatgtgtctgtatagtgtgtgtggcatgtggtgtgtgtacacacaggtatgtaagcaaacgtatgttggtagggaggatgctgctaatcaagtactgcgtggcatctgaaaactttgtggccccacctttcttgttctctttttattcaatctgagtagtagtacttcccttagtacctacttagtccttagtagaatggtagtatctctcagtggtgtgtgtttgtgcctctgtgagtgtgtgtacatgcatacacctaggcacacaggtgtgtatatgtgtgtgacagaagaggggcacatgtgcttaaagggaatgcccacaagttatagtcttaaagactctgccctgatgctcccctaaagctcctggatcttagaattaggacacatgtgtgggctctgcctccatcttgcatgaccttgagcaaggagcttgttcttcctggcctttgtgtgtgagccaatggatggcagctcactctgcttttaaatcactgcagcatttacctgttaatatgacataaaagttctatgtgaatcccaagaaccactttaatatttaatgttctcagagctggagcctggggcatactcaatcagtagcagataagattttatgtctggttaagaatttatccagcttatacttgttactaagataagtgagtggtcccatggctgactagtttcattttgcccatttttagactgaaagttccaccctctctaagtcctgggcagattaggatggttgtctctaactggatctcatacttgagcaaatcaggaaggaaagggtcttttttatttattttattttagagacaaggtctcattttgttgcccaggctggagtgcaatgacgtgatcactgctgctcactgcagcctcaaactcctgaggtcaaaacaatcttcccacttcggcttcctgagtagctgtgactacaggtgcaccacatcatgcctggctaatttttgtcttttttgtggagacaaggtttcaccatgttgcccaggctggtctcgaactcctaaacataagcaattcacccaccttggcctcccaaagtgctaggattacagacgtgagataccatgcctggcctctttattttatttatttttgagacagcgtctctctctgttgcccaggctagagtgtaatgacatgatcatggctcactgccacttcaaaactgccttttatcattttccttttttcctacattcattcatccactcctatctccttttcaggtctgtctgggaaccctgcagatctggagaaacgtaggcaggtgtttggacacaacgtgatcccccccaaaaagcccaagactttcttagaattagtgtgggaagctcttcaagatgtcacgcttatcatcctggagattgcagccatcatctccctggtcctgtccttttatcgccctgctggtgaagaaaatgaacgtgagtgtcctaaacagctcagcgtgactcttatctgggttctttccaccaccaccaccaagcgcttagtattggtggctgacaggttatagcttaaaacatttcccccattatccagagtgggctttccaaaggaaaccaagcagtagctactaagctattcttccaactcatccttattccaagggttcctccccaccccaccctcaccctctgtcttctattaaatcctttttcggaatgtcaggaatcctctacccttttaagacattttatttatttattaattattattattattattattttaatggaatcttgctctgtcacccaggctgggtgcagcagcttaatctgggctcactgcaacctcctgggttcaagcaattctcgtgcctcggcctcctgagtagctgggattacaggcgtgtgccatcacgcctggctaatttttgtatttttagtagagacagggccttaccatgttggccagactggtatcaaactcctgacctcaggtgatccacccgccttggcctcctaaagtgctgggattacaggcgtgacccacttgcctggcctatttaataatttttacaacatagagacaaggtctcactatgttgcccaggttggtctcaaacccctggggtcaagcgatctgcctgccttggcctcccagagtgctgggattgcaggtgtgaaccaacacccccagccaggaattctctacccttatccaaccaacaaaaccctacatctcaaagtgccccctgccaccaattgtctggcatgatgggaaacagtagtgaaagcctgaccatgttgggaaccataagtgtgaccttacatgtgacttccctaaatttgatagtttgtactatttagtcatttgcctcttttggattaacataaatagttacactagtgataagacaatactcaatcctgctatcctctgatatcctcttccagccaacagttgtatttgctattattcacttttcctgactttctatcttggggtgattgtggaagcactactcctatttcttaatgtcaacaaaagcccttcagtgactatttctctcccttcctgggatagtgtgtggtcaagtcgcaactaccccagaagatgaaaatgaggcacaagctggctggattgagggggcagccatccttttctcagtgatcatcgtggtgttagtgactgcctttaatgattggagcaaagagaagcaattccgggggctgcagtgccgcattgaacaggagcaaaagttctccatcatccgaaacggtcaactcatccagctccctgtggctgagattgtggttggtgatattgcccaagtcaaatacggtgagagctccgtgtttcttttgcttaccccaccaccacccccatttaagggataggtcctttggcatgagggggctgggaattgctgaaaacccaaaaagataagatccaaaattgtattcacttctaggttagagtttaaagaggttgtgggaagccatttcagaaaggagtagctgaaactctgtcgcaagattgtcagacttgtaccctgtgtgtcttagggttaaaagtgtataacattcaggccatggaaaggtgttggggatgaataagagtttgaatttataatgcctggaaagcaaccttctcccagattgtacagagctgaagacttgtaaagagtctccatgtactctcggccattgctgtctagatagggcccatgggaacagccatgagatagggttgaaggagttggaggaccctaccctcagccagtctcttactatctccttcactgtccctccttcccctttgtgctctaggtgatctgctgcctgcagatggaatcctgatccaagggaatgatctgaagattgatgagagctctctgacaggggaatctgaccatgtcaagaagtccctggacaaagaccccatgttgctctcaggtataggccctggctgcccaagttcccatttacctccctgcaaacacctaggccacaggatccagaccctgttctctcctctgactctgtcccatctccttccctggggttcagctggggcaacagcattttggtgggtggaatacaaggatatcaggcagcctaaatgaagttttccatgaaacaagtgttataagggccttgaaggggctttgctggttgcaggggtggcgggggcaggagggagggcttaccctaaagcggttagacacattttcctccttactcccaatttgtctggtctgttttaaatgcgcccagctcttgaccttttcctactgtgctaagcacatcattatccatggggtagggaggagtattttttcttctaagtttgtgtttcataccaaatcatgtctaggtattaaaaaacccattccttcccatcttctcctttcccgtgtagggacccatgtcatggaaggttctggccggatggtggtgacagctgttggtgtcaactctcagactggaatcatccttactctcttgggggtcaatgaggatgacgaaggggagaaaaagaagaaaggtaaggggcatctggaatgagattctctttcctctcatccccatggacaaacaaggaagcgagggagcagatctggatagaaagcatggttggaagaatctgctgccatgaagaaagcagatatccaaactccttgctgagataaagatgtaaatccttggctccagggagctctgatgaaaaccagatcctggctctaggctcccaaatcaggttgaatttgagccttgatttttatgtctaatggtagcttgtaaagggatgagttataaagcctgccctaaataaactggctaggtgctggtagccccaaatgccttccgtgtactccccctccttccccaactttcttcctcaaagatggggggttaaacgaaccatcaagactaagagaaaattggccagaagagtaaaatagatttctgccgaaactgtaggctctcaatggaagagacacacagctagaagagtaggaacagttagttcagtctttgccactcagttattcctgaaggaaagaataagagggagaaagaggagaagatactaaaaccaagtctacacgtttccctaagcattccttcttcccttaggggagagaaggtttctaccacttggctggagaatcatcttgagctgtttagtggaggacagtttatgaaaaggaaacaaaacacattctctcaggaactaaataattcatttctgcagctgcctgcagatgaataagggggaagcttgcctggtgctgttgaagtaacacggagacacctttcaaagtctttgccatcaggcagaaacggttcaaacctctcacttcctaatccccaccccatttttccaagcaatgtgactcaggccaggagcaagagaaagcacctcaggtatgagtatgcactcacctacatgagcgttttggtggatatcccgaggattcatgacagcctctagcaagaatgaatgaaaacagagatgtgagcttcctttacatttatgtcccttccctgcaacccaaacactttgctgttgtccttctgggctctgagcaggaccaacaaattggatctcttaatagttactttgggtttcgaccccacttttttctttcttgttcaaacaggtaaaaaacaaggagtccctgaaaatcgcaacaaaggtaacctctccaactactcatttaccatctctacctgcccacactcaaaccagacctttccaggccatcttccttctcccttttcctctccataaatctgttatctgctgctgtggctcagatgcctcatcctgaggaaggtgcagagatttttggggtggtctcaaggtcctgatcccaatctaagatgggacaacagcaccctctgctgttggctcacagaatgtcatgtcaaggtttgtcttggggagtgtgtaggattgatctgctcttcctagggagctgaactctgcttcattgacctcagcctgatttaaacaccaacagtcatcagtttctgggttggaagacttcagggtcctcatggtggagggaggtggggtgggtagtccctgcaccgtcctcttgctagcttcctcataagtgtcctcttctggtctggatcccttctctgctggtcttctcaggggtgcttggagagagccctttctctgtatctctctccccacctcccttctttgttcttgccacagtctgttttcttcctcctgatctgatgtgtgtgtctcttttggtgactgtgttcacattctgtctccgtcttcttgtttgtgagtctgacagcagggactactcaggaagggtatcctaagcaaggggctgagccctatagcagtgaaagtggagtggtgctgggagccagcaagaactactgtcttgtgacgctcctagagatttgtttttactttgtaacccacatcacagcagtctttagaaataaagtcatcacattggaaaaccagagctaaacagaaataattctttaattttaggtctttaactcttcttttaaaagcaaaatggatttatatgtctctctttatccctgctttctcttattccaggaggtccctcacaccagcttcttccctcttccccaaaagacttaaccccaggtcccactctgtatctctctacctttgtcaggcagggaagaaagggaattttcttttcctatcctcaactgctagaaggggctggaaaataccctgggtctgggggtatgtgtttcttccctgacaatcgagagagagagagagagagagagagagagagagataaaccatttaacagagcaatcttgtgctccagaaacatctgccaaccctctccttcagcccctttctgcagtaaagattcactattttaagcactgagttccaggaaggatggttgttttaatagtgcttagtgacatgattaatccccttgctggaataaacctagcttgggactctgaggtagtaccaggaagctgccactgaagaagaaatccataccctaaaagcaccccagtttcatctaaactcattagaatattattccaaaggccctaatagagtgttgaaggcaagttccatgtctagcatgggttggaagtggtcggaactgatgtcagggtccaaggtatattccgggaaagagacaggaaggttttctggtttccacctgcctgccactcagtgctaccaccttgcctgctcacctgtcctatttgtgtgtacactccagcaaagacccaagacggagtggccctggaaatccagccactcaacagccaggagggaatcgacaatgaggaaaaggacaagaaggcagtcaaggtgcctaaaaaggagaagtcagtgctgcagggcaagctgactcgcctggctgttcagattgggaaagccggtgagtagggtagagcctcgttgtggtttatcaatgttgtcttggatcctcatcacttttatccccttctttctgcaccgaccgagactggcagaaagaagctgaaacttcagggtggctagttggggctaggcggctgtttccctatctccgccactgtttggtcgctccctaggctttttcagagagaaatgttttcctgtgtgtaagggttaatggccctgagatctcttaatccaaatgaatgagaaacaaagagcatatattacagcaggggagatttacattagcaagaaggaagactttaataactgcttacctgtctcttgctttgggttgtaaattccttaaagatagagaaggctgcagcttgctacaggcaattctctagcataggagtaggatctggctaagcacagagcaataaataccaagtaaggactggaggaagaaggaaggctgtggttacagaggctctctccagaagagaggtaactaaataatgcactctgcatatgaggaagtggcttctccatcacttgcctctacattttcctgtctcaccaccttctttcaatggagggggagaaaggggagtgggaagaagaaatagaagattgctactttagtggacatatctctcaaggaacagtctttttttttttttttttttttttttttttttgagatggcgtcttcctctgttgcccaggatggagtgcagtggcaccatctcagctcactgcagactctacctcctgggttcaagcgactttcctgcctcagccacccaagtagcagggactacaggtgcacaccaccaagcccatctaattcttgtatttttagtagagatggggtttcaccatgttggccaggctggtctcgaactcctggtctcaagtgatccgcccacctcggcctctcaaagtgctaggatacaggcataagccaccgcaccctgccagagagtagttttttaccactgtttattctctgattccacctttctgtttaccacaatcataatcagcacatctctgcactttatacagctgtatacaacttacctcgggttcttgttaaagtgtagattcagttcagggggtctggtgtggagcccgagattctgcattcctaataagcccccacaggatgccagcaccgctgattcagtttgcacacattggatggcagggatctatgctgcccaccatagcagccactcaccacatgtggctgctgcaatttaaattaattaaaagtaaataaagttaaaaatccagttgctggggtaaattttagttggtcacgagccacatgtgctagtagtggctgtcatattggacagcataaatagagaacttcttaagcgtcacagaaagatctattggactgagttggcctaacctcttcatgtccattctggtacccagctaattttaactactgtgaaatctcttgcatataaactatacatggatgagatgaattgcaggtgcagaatcaaacacacaggtttgaaacattaaatctaccccacctaacccttgtactattctcctaatccttgccttgttgttgttgttgtttgtttgtttttgagacaaagtctcactctgtcacccaagctggagtgcagtgatgcaatcttggctcactgcaacctccacctccggggttcaagtgagtctcccgagtagctgggattacagatgtgcatcaccatgcctggctaatttttagtaaagacagatttttgccattttgggcaggctagtctcaaactcctatcctcaagtgatctgcccctggactcaaggaatcccatggcctcaagtgatctgccggcctcagcctcccaaagtgctgggattataggcgtgagccactgtacctgtcccctgccttgttcttcttacagagtacaagctacctgatggctggccactagtctcctctgttgctttattttatatattaggccagtccaggaatagggtgaggcaagtcagatgctttccaccacctggagagtgagttccttaaattttgcactctcagtggcttgcttctccacctgagtcctggccctaatcaagcaaagaacggaagaatttgctttcattgatatcatcatctctagccttgcttggaggcccccgaatcatcaggcccttgggaaaagcaaaaaccaaaaccagataatgatttaaagcagagcttttcccaaatattgtgccacagttagggacagttgtccccagatattgattccatcagccctcaaagcatccaggcagcacccatggcaatcagaacccctaagccagtcggttttgaccttgagcagattctttcacgtactgtaatgtgtagggtaaccaaccatcccagtttgcttgggattttctcaattttagcaaagccccacatccctggaaactgttcagtagtctcaggatggtttggttactctaccaatgggccataccaaagacttcccagtactttcatttcctcatctttaaaaaggcggtaataataatgacctatttcacagggttgtgaagtgcttgcctggcccacagcaggtgcccacataagtatttactattattggcatcttctatgtgtgccgtgacaagagaaatcttgggaagcactgttctaagagttagtcatgcaggtgatacactagcaccatagaggcattgttgtaaacaaggtgtgaattgtccaacattcagaggttagtagaggagaagtcaaaattgataaactactatgaaatggacaagtacagtcatgacattatgaatcgcagggagagggtgggcgtggaataggatcatagaaagctgtttcaggaaacagatcaaccccctgatttatgaatgaggaatttgatctaggaaacaggcccagagagggtcaatgacttgtccaaagccacaagtcaagttagtgcagtgctgagaatagaacctgtgtctttgaaatacgaaaccactgtctgttccctatgctataatgtacaagcaacagagaatgggggggattttagtaagtcttcctggcgatggtggttttaataattggcaacaaaggctacaactgatgccaatctatctctggctagggccctaggactgccctccagcctgggttcatatgacttgtttctctggacaggtctgctcatgtctgctctcacggttttcatcctgattctatactttgtgattgacaactttgtgataaatcgcagaccatggctccctgagtgtactcccatctacatccagtactttgtcaagttcttcatcatcggcatcactgtactggtggtggctgtgccagaggggctgcctctggctgtcaccatctcactggcctactctgtgaaggtgagactagaacaatcctatctcttcctttaggatagagatgggagagaagggtaccatgtaacctttagtgaaaagataagccattctatcatctataaactttggctggtgcctcacaagagcagaagtccctggtattatggaaggaccatctctgtcagatgcatcaatgttgaaatgacccagcagaatcttaagagaatgacaaaaatggtatcttggatttttttttttttttaagacagagtctcattctgtcacccaggctggaatgcaatgatgcaacctccgcctcccgggttcaagtgattctcgtgcctcagcctcccaagtagctgggattacaggtgtgcaccaccatgcccagttactttttgtatcttttacagagacagggtttcaccatgttggccaggctggtcttgaacttctgacctcaggtgatctgcccgtctcagcctcccgaagtactgaaattacaggcatgaatcactgcacccagtcagtatcttggatttttgtgtgggactggaagatgaaatgtggagagatgttggctaggaaatggcctttgacctagatttaggagagtccagttagtccccctctcaagtcttttctcttctcctttgtagaaaatgatgaaagacaataacctagtacggcacttggatgcttgtgagaccatgggcaacgccaccgccatctgctctgataagacaggcacgttgaccatgaaccgcatgactgtggtacaagcttatattgggggcatccattaccgtcaaatcccaagccctgatgtcttcctgcccaaagtcctggacctcattgtcaatggcatttctatcaacagtgcttatacctccaagattctggtaagcatttcctttgcgtagacacttagagtgggtggttggaagggaacatccattttctctgaaatgaacccccttattgtttacactgcctaaattgccatcccacatcccatttctcacgctggagtgaacatgtttgggtgagactacagaaaaatccctgggagtcaatggagggttggaggtaagggcctgtaagaatctatggccaggaaataccctcccaattagcatgtaaaagcaatgtctctaaggagggaaagtagaaagtaacccaaagtagaattgggcttatcagaagtaaattactcactttctagaaacaagcatagtgtattagaataagacccacacaaggcgagacaccagcactaccactagagcaaactacaaaatccctaagccctggatggcacaaggatcacggttaccactgacccctctctgcctacccttgaaaaacaacaggctaggcatagtggctcacttctgtaatcccagcactttgggaagccaaaatggtaagatcgcttgagcccaggagttcgagaccagcctgagcaatattgtgagacctcatctctacaaaaataaacaaaattagccaggcatggttgcgcacctgtagtcccagctactccagaagctgaggtgggaggatcacttgagcctaagaggtcaagtctgcagtgagctgagatcacaccactgcagtcaagcctgggcaacagagcaaggtgctatgtcaaaaagaaaaagaaaaaagatgccaggtgctgtggctcatgcctgtaatcccaacattttgggaggttgaggtgggcagatcacctgaggtcaggagttcaagaccagcctggccaacatggtgaaacccggtctctactaaaaatacaaaaattagctaggcatggtggcaggtacctgtagtccctgctactcaggaggctgaggcagaagaatcacttgaacctgggaggtggaggttgcagtgagccaaggtcgtgccactgcactccaggctgggcaacagagcgagactccatctccaaaaaagaaaaaaaaaaatgttatttcccctatgagctccaggtatataatgtgaaggctttgtaaatgagttctttctccctaagttctctgccttgtcaaggcatcttactcaatagtgctgtgtatatttcttctcccagcctccagagaaggagggaggcctgcctcggcaggtgggcaacaagaccgagtgtgctctgctaggctttgtcacagatctgaagcaggattatcaggctgtgcgtaatgaagtgcccgaggagaagctctacaaggtgtacacctttaactcagtgcgcaagtcaatgagcaccgtcatcaggaatcccaacggtggcttccgtatgtacagcaagggcgcctctgagatcatcttgcgcaagtgagcacccccgaccactctgcttcccttcaagatcctctcctcaggaaggcatgggtgcacaccccacactgaacccatgtgaatgagggagccctccagccaggtggtgacataataactaatatccaagcgtctactcaggccacgcatgttttttaagtgcttaaggtggcttgttgtatttaatcctcacaactcagtaaggtgggtactatgattatccctgttttacagatgagaaaacagagatataaggaagttaagtatctcactcaaggtgatacagctaatagtggcacagccaggattcagacctggacgatcctaagtttccatttcctaatctgaaaacagagatagccatactcagctcctaaaagtactaccccctcactgtaactaaatgattcaatgtatgtaaaatgccttatacataacaagtactagaaacgtttgttctgtgttctcttttccttctctttccttcccattcccatttctgattacagggaatttacataactttaaaagtgactattcggccaggcgcagtggctcacgcctgtaatcccagcactttgggaggccgaggcaggcagaacacgaggtcaggagttcgaaaccagcccgaccaacatggtgaaaccctgtctctactaaaaaaaaatacaaaaattagccaggcatggtggtgcgtgcctgtaatcccagctactcaggaggctgaggcaggagaatcgcttgaacccagaaggcagaggttgcagtgagctgagatcgcaccactgcactccagcctgggtgacagagtgagactccattacaaaaaaaaaaaagtgactattaataaattacccatagttcatcaaaagttggcactatacctaagtagggctgaattaaccagtgctccaacatggctttagccaccttcttttaatcagcacattcttgtataggaaacctcccccaaaccaccagcaccacacagtgagcactattctaaatactcggattgaaaaagtctctctgccttcaagaagttcaaaagagcaggtgattcacaaatgacttgcattgcattcacatatgggtaagaacagatgacatgggagaatcccactctctatatatctagaccttaactccatccacagcccacctaccttggaaagagggactcagctgggtgatgaatgaaggaaatgtttggccacacttggagcaatgtctttaggaataatacagagttgccaaaatacctgtcaatgattgtagaaacgtattgagtgggaagggagacaccgcgttcttactgtgcgcctccccaggtgtaatcgaatcctggaccggaaaggggaagcagtgccattcaagaataaagacagagatgatatggtacgcactgtcatcgagcccatggcctgtgatggactccggactatctgcatagcttaccgggacttcgatgacacagagccctcttgggacaatgagaatgagatcctcaccgaactgacctgtatcgcggtggtgggcattgaggaccctgtgcgcccagaggtgagagggtgggaagccacccaggagtctcaggaagtggggtactagttccctttctagttgtgaccccaggcaggtaacctaactgcctctcacttagagggatagaagtttctgtgcttcctgcttcacaggactgctgtggagtgccagtatgatcgaatgtggcattcctaggactaatgctgtctgagtgttgagaagcaaagggcttattgggctcattatttggtacttaagtgttgtcaggaggtcaatttagccaggacaccaactttgtctttagctccctcctttcaatcaacacattctttttgagtacctgctgtgtgctgataactattctagacactaggggattgaaaagtctctgcttctaagaagtttagacagatggactattaattctcaaggcccagaggcatgagagggtgtcatgcatgtgggaaattacaaagagctgatatggttggaacatgggccaggtgggtggagagtggcaaaagcttctgctagaaaagaaagcactggccaaatcgcaaaatgccattcatgccctgccgagaagtctcaattgtaagtgaaagagcaagtttttacacctcactcccaaagcaaatttccccttcaactcatggtacaatagggcaaattcaaatgtgactgccgtgggtaggacagaagtgaggtggcacccaacagtatcaaaatgaccagacctagcccatgctgcatggcaccacttctagggtgcctttctcctgtctgccacaaagggacagacaaacagggacagcttaccagggtcatcaccctcatctgcgcctttcccctttcttcactctccataggtgccagatgctattgccaaatgcaaacaagctggcattactgtcagaatggtgacaggtgacaacatcaacacagcccgggccattgccaccaaatgtggcattctgacacctggggatgacttcctgtgcttagaaggcaaagaattcaaccggctcatccgcaacgagaaaggcgaggtgggtcctggctagggggaaccaggacctcacctgacaaggaaaaggcgggttctagcataaggcatctgggtcatgtgcgggaaggtgggtggtttctaaagtgaaagctattcgtagtgaaacatctccttgtaccaaactgctgatatggtaacattgggagttgccggctgggcgcggtagcttactcctgtaattccagcactttgggaggccacggcgggtggatcacaaggtcaagagatagagaccatcctggccaacatggtgaaaccccgtctctaccaaaaatacaaaaattagctgggcatggtggcgtgcacctgtagtcccagctactggggaggctgaggcaggagaatcacttgaacctgggaggcggagggtgcagtgagccaagatcatgccactgcactccagcctgggcaacagagcaagactccgtctcaaaaaagaaaaaaaaaagagggggggagttgcttgtgaatgaagcttgctagcttcattcacaagctatcttttgagacagtgtcactaacttttcttgtctttctgctttttcagttttttatactgacttccccctagcccacccctcctgtgtccctgccctttggctaacagtggctaaaggagaatgtggtctggcggtggcacagatccaagctttcctgagctacatagaaatcaaacctaagacctcagaagcaccactttacccacccgagccaacagccaaccctggcccacctcccattaaaggtctgggaaatgggggattggctgccaggtagggacttgggaggaaaaagaaaaaaagcagggcctgaatggtcatcatccatgaatctacccttggagactggttggctgtttcatctctgcttaatccagaataacactttcatgtgggactgtggtgtacccaatctcccagtgactccaagtgtatggagaagttaagattttcctggatagcttttctgcatttgactgatccaggtgtggtctggtgttggcaggtagagcaagaaaagctggacaagatctggcctaagcttcgggtcctggcgcgatcttctcccactgacaagcacaccctggtgaaaggtgaggttggcttccaaataggtgcctgcaacagctgaaggcaggccagggcgaggacagataagaaccaccagccaaagccactctcctgtccaaatagggaggtcctaggagagctcccaggctagtggggagaacatacagttagcaaacatctgagcccttggtgagtatgacacacaataaagttgttgggtttttattttttttattttttgtttttatttttggagaccgagtcttgctctgtcacccaggcaggagtggagtggtgcaatctcagctcactgcaacctccgcctcgtgagttcaagtgattctcctgcctcagcctcccgagtagctgggactacaggcgcatgccaccatgcctgattaatttttgtattcttagtagagacaaggtttcaccatgttgaccaggctggtctcgaactcctgaccccaggtgatccgcccacctcggcctcccaaagtgttgggattagagccgtgagccaccgcacctggcaattgcatgggttcttaaaaacatgatcatgtcttatttaccaatagtactgtgaactaggcagggcaggtattcccattttacaaatgaggaagtttgaggctgagaagacaagtaacttacccaaattacccagctggtacgtggaaatggtgcagtttgacccctaggtctctgccttgaaatccatcctatgtgttcttcatagctgtcttagggtaccggatgaggacaaacttagttcagtgctactcatgaaacaacttactgcccttaggtggttcctgtagaacttctaggaaagggaaaagggaaggaaagaagaaagtagaaggagtggcgggtggtaggaactgaagggtgggggagaccagaaaagctcactgtggtgtgtctgtttctcccaggcataattgacagcactgttggggaacaccggcaggtcgtggctgtcactggtgatggcacaaatgacgggcctgctctgaagaaagcggatgttggttttgccatggtaagctcagcacagtgtctctctgattgcaagctgccttctccatcaggaagccaggtccggcttctggttgcctgctgcttgctacacctgcatagcccatggggtgcttttttgtccaactccatctctcctatctaccgggccaatcatgatatatgtaactggggacccatcaagtatgaagaatagataagagggagggaagtcatgaagaatcatatgcaggaaagccagaccaacataaacttgcctataaacatgtgaggttgtcaactaggcaaactctagaagatttgtgttccctatggtaggcgctctgtgtggctggcaccattgggtattccgcttttcacttctgaggccaagagcatcagaatcacttggaaagttcatgtgaaatcacatgttccaaggctccacagttagacgtcttaattcagtaggtctgggatgaataccagaatttttttttaacaggcacaccagttaattctgatgttcagaaaggtttagaagccccccagattctatcctcacactcaagtagtttatgattataagcctcccatacagattgaactgttggtgatttttagcagtggaaggacatttaagaagtcatctatctttagagaactcttttttttaagggttttattctaggaaatttcaagaatatgcaaaaatagggagaattgacaggtacctgtcactcagcttcaactatgatcaacacatggccaatcttgtttcagtgattcccccccatttacatccccagtcttcagctgaattgtttttgaagcaaatgcaaggcatcatgtaatttcatccttaaaaatttcatggccgggtgcagtggctcacacctgtaatcccagctactcgggaggctgaggtaggagaatcacttgaacccgggaggcagaggttgcagcgagccaagatcacgccactgcactccagcctgggtgacaaagctagactctgtctcaaaaaacaaaagagattccccctcattgactatttgattactctgaggcgggcagatcgcctgaggtcaggagttcgagaccagtctagccagcatggtgaaaccccagctctactaaaaatacaaaaattagctgggcatgatggtaggcgcctgtaatcctagctactccggaggctgaggcaggagaatcacttgaacctgggaggcagaggttacgatgagccgagttagcaccactgcaccccagcctgggtgacagagcaagattccgtctcaaaaaaaattttcttttcattatatggggggatggtgtggggcaaaaaaaaaaatttcattatatgcctctaaataataattatatatcaataatctatatatctaaaagaatcttaataccattatctcagaacaaaatcgatgcttccttactatcatgaaatttctagtttgttcacattttcctaactgactcaaatgtttttatagtttatttgcccaaatcaggattcagataagatccataacttgcagttatttgatacatctgttaagtctcttaacctatctcttggagtgcgcctccttccagctgtaccagtagctgtactagctgtatagtaggtttctatacaaacccatagaatgcagattcacccactcaggccccaccccagatttactgaattggaaagccgggaactggggcccagaaatcttaattaattatgttaaatctgttaaatgtgttttgacaggctctctcagtgattctatgtaccctaaactttaagaatcactgatcttataggatctctatgttgggagtccccaaaaacacccctatattcatggggttgctaggaggactcatgggacttggcatatagttgtactcatgactaagattcataacagtgatgtagtaagaatacagttggatcataaaagaaaaagacaatggcagaatctggataaatctatttgcagtctttcttatgctctccctcccatgaggagtcaaacagagtccattctttccccactaatgaaaacacagaaatatatgtgtgatgttctgcctagggaagcccatcatggacttagtacccaaggtttttcttgaggctggtcacataggcaccttctgcctagcacataccaaaattccagactcccaaaaggaaagcaaatgttcaatgtaaaccacattgttcggacacagtctagacacaatgagccacctttatcagttagttgttgagggcaagcattctgagagcccatttcccagaagccagccaagggcccaccctgcaagcattccttcctaaggacagtcgtctcaggcctgctgtgttaactctcttttgcacaatccccctccatcttttttcctagcaacttagttttgaaggaagtgggttgtttgtctgcagagactatccctcagtatagattttgttgattatttcactgtgatttcctttaacgtattattttcttccttatatttcctataagcaagtagttggttctagaagttatcagattctagaccctttctttcattgagggctgcaaaatgacaatattgtaattctttatttattaacttaaatacttacataaaaagagattcccggccgggcgtagtggctcgtgcttgtaatcccagcactttgggaggctgaggcaggcagatcacgaggtcaggagttcaagaccagcctggccaaaacagtgaaacccgtctctactaaaaacacaaaaattagctgggcatgatggcgggcgcctgtaatcccagctacttgggaggctgaggcaggagaatcacttgaacccgggaggcagaggttgcagtgagccaagatcacgcctctgcattccagcctgggtgacaaagctagactccatctcaaaaaacaaaagagattccccctcattgactatttgattactctgaggttccaatcctacctgaaaggtaggtttttggtttgttttttaattactggttttttttaaaatgatgagttgactttttaggaacctccaaaggtgaccaatgagtggatttttttttaagtatcattacgaattcatagatttaagtatatttgatgtgtttcaatccactgctcttagtatggttttgatgctcaaagtgatccaccattaggcagaagaggcctcttcaacattgctgagtcctttagatacaaccccagttgtttttaatagctttcttggtttattcttggttttttcgttcttttttatcctggataggagatagtccatttctccaaggattcctgcttcattttaatgtgaaatggtatttattttatttatttatttatttatttatttatttatgagacggggccttgctctgtcacccaggctggagtgcagtggggcagtctcggctcactgcaacctccacttcccaggttcaaacaattctcctgcctcagcctcctgagttagctgggattacaggcagctgccaccaagcctggctaattttttgtatttttagtagagatggggtttcaccatgttggccaggctggtctcaaactcctgaccgcaagtgatccacctacctcaacctcccaaagtgctgtgattacaggggtgagccaccgcgcccggcctgaaacggcctcccaacactttgggaggccaagggggaaggagcactagagaacacaattggaactcaaaggtgttccttgctactgagtagatctttgtttctaagccttttcagtggacaaagctaagaagtatgctcttaagtctcacttgcttttgtgtttgttttgtgtttgctcacaaagagaaaatacttcgtgaattcatatttctgtttttcatttacttttagaattacatattttttattccacttttagaagaaataataattttttaaagaattatagatgtctaacttcctgatttataactttctaattttattttattttattttattttattttattttatttagttatttattttgagacacagtctcactctgtcgcccaggctggagtgcagtggcatgatcttggctcactgcaacctctgcctcccaggtacaagcagttctcctgcttcagcgtcctgagtagctgggattacaggcgtgtgccaccacaccctgctaatttttgtattttttagtagagatggagtttcgccattttggccagagtggtctcaaactcctaccctcaagtgatctgcccaccttggcctcccaaaatgctgggattacaggcatgagccaccacacccagcttctaattgtatttaacttccctgattttatgtttgtatcccttaagctgaaaattttgattcctaattgcattaacatgattattttttgttttattctaaaatatttcaagtagttacaaaatatcaataatattaataatacagttactctgccaaaaacaattaaatatttttctcatagttccttttatccataggtatatgctaccaggaatgtgccatcaaattattgtttttaagtcatttgtaacatttgtctgtgtgtgtgcagttgtgctaccaagtggctaccagatcatttatatcatgttactttccgttttggagattgctttttaggccagtgtggtggctcacacccgtaatcaatcgcaacactttgggaggccaagggagaaggagcactagaagccaggatttcgagaccagcctggacaatatagtgagactcccatctctaaaaaaaataaaaaattagccaagtgtgctggcacacacctgtcgtcccagctactcaggaggctgaggtgggaggattgcttgagcccaagaattcaaggctgcagtgagccaagatcacacctctgcactccagcctagatgacagagcaagaccctgtctcgaaaaaaaaaaaaaaaaaaaagcaagagagataaaatacatggttctaaagtcaaatgtacaaaacaaggtatattcatacaaatccggcttccaccctcattgcctttgccttgctgcttccctcttaattcaataggtaatttttttctgtcgtttttggtgtattcttctgtttgctcctttaaagtataatcaaatgcagtctgggcacggtggcacatgactataatcccagcactttgggaggccaaggcaggtggatcacctgaggtcaggagttcaagaccagcctggccaacatgatgaaacccctatctctactaaaaatacaaaattagcccgtcatggtggtgcgtccctgtaatcccagccactcaggaggctgaggcaggagaggagactcgcttgaacccaggagtcagaggtagcagtgagctgagatcacaccactgctgtccagcctgggcaacagagggagactctgtctcaaaaactataaataaataaataaataaataaataaataaatgtaatatattcatggcctgcccccttagataagtgataccataccatcaactcatttttctacctttctttcttcacttaccaacataacttagagattatttcataatagtaattataaagctgggcgatatagagagacccccatgtctacaaaaaatttaaaaattaaccaagcagggtgagcaaatgcctgtagtcccgttactcaggaggccaaggtgggaggatcattggagccccagatgtggagcttgcatttagctgagatcctgccactgcactccagcctggacaaagcaagaccttgtctcaaatttttttttaatttaacttaaaaggaaaattttgaacaaagatgaaattttggaactgtgctgccatactactactcctagaacaaatgcagagtttctcaaaggtgtcggaataacatgggcttaagtgagatactggcagtggcaacagaaatgtgagaatttggaggtagaatagacaggatttgctctctaccttttaattagtttccaaggttgagggagtaggaggggagggtgaaagggatatcaaagatgattgtaattcccagtctgagctcaacagtaaggttggtggcatcaggccgcagccctcctttctctagagtgacagtgacacatttgctctttgttttcttttgtgtgactagtgtgccctgtagtatttacactgacttcggaagcttcctggaggtcaggaaatggagcctgggctttatccactccctcactgttttccctcccatcttacctcagggcatcgcaggcacagatgtagcaaaggaggcttcagacatcatcctaacagatgacaacttcaccagcattgtgaaggcagtgatgtggggacgaaatgtctatgacagcatctccaagttcctgcagttccagctcactgtcaatgtggtggccgtgattgtagccttcactggagcctgtatcactcaggtgaagggggtgtgggtgggctgagacgggagggatgagtcaggggctaaggaacatggagtgaagactacggtgtgtttactgaagagtaaagacagcgtttccccatgacattgggacaggagttagctcttctaagtctgctgtcttcatctgcttatgtagatggtaacttacaggccttagcttagcacttatgtgtcagccactgtaataagcatttatatgcactatctgtattcttcaaaaatgaccttgtgaagtaggtattattatccccattttatgggtgaggaacttgaggctcaaggaagttaagtagctttctcacagtcactcagctaggaagtggccagattccaagtctaggtgggtcgtgggagctgggccatcgacagggcaaaggtgggctggtttcagagaaaagctaaaaggactggttcttctccccgccaggattccccattgaaagctgtgcagatgttgtgggttaatctgatcatggacacttttgcttcattggccctggccacagagccccctacggaatctctgttgaagcggcgcccctatggccgaaataagcctctgatctcacgcactatgatgaagaacatcttgggccatgcattctatcagctcattgtcatctttatccttgtctttgcgggtgagccactttgggggtgggtagcagctggggtcctggttggaggtgggggcagagaaagaaggtagcgtgagagcaagtgcacaggtcaggaataagcgcagcttcacctcccagtgcttgctgtgctcccgctacacggtgcattatgctactatatgtactcatacagtactcttgagtacagtgtgtactgtgtgtactcaagaatttcacaagggaggctttattatttctttctttctttttttttttttttttttctttttggagacagagtctcgctctgtcacccaggctggagtgcagtggcgctaactcgggtcactgcaacgtctgcctcccaggttcaagtgattttcctgcgtcagcctcccaaatagctgggattacaggcatgcgccaccacacccggctactttttgtatttttagtagagatggggtttcatcatgttggccaggctgggctcgatctcctgaccttgtgatctgcccacctcagccccccagagtgctgggattacaggcatgagccaccacgcctggcttatttctttttttacagattcaaaaaattaacctcaggtcccataatgagtacatagttgcagtaaaattcaaacctatgattgcctgactccagcgcacatagtcttactaccatgctgcactacatgagagcaagtatcaatgcagcaaactgagagagaaggtaaaataagtcaagaccagaactaacatttaaaatgtttaataactagtacaacaaaaaattagccaggcatggtggtgcacgcctgtagtcccagctatttgggaggctgagatggaaggatcacttgagcaggaaggtccaggctgcagtgagccatgatcatgccactgcgctccagcctgggtgacagagtgagaccctgtgtcaaaaaaataaataactagtgcagctcagatattgattaattagaatggacaccagccataagcaagcagtatatctgtaccaacacattcttactcttagttcagaccacacttaacctccagtgcttctcctctccccactaggtgagaaattctttgatattgatagtgggaggaaggcacctctacattcaccacccagccagcactataccattgtttttaacaccttcgtgctgatgcagctcttcaatgaaatcaactcccgaaagatccatggagagaagaacgtcttttcaggcatctaccgcaacattatcttctgctctgtagtcttgggcacattcatctgccaggtgagattctatctgcagttggggcaggagatctggaatgataaagggcagaagctgggagccagggttccctacatacctaggaaaaggaatgaaggaattacggggactggagctgtaagttgaacactttgggattcccaatctgctttcttttgcatattgctctagaattggagcccattgtgtcaagagctccagtgcagggcagcatgttgactggaaataaaataatacttctaaaatcctttcatgatctttctaaatacacagaaatttcacagaatgaccaaaagaagtattctcttctagtccctttctatggctcctgtcagcctatatgaaatgtgcatgcacatctagtatagactctccctgtccctgccctttgttctgaagggcttatgataaaaagtgttgtgcaactcaaagaaagagaagtaatgggatttgtacatgtatattacatagtcagcccagcttggactcctccaatatgagactatgagctgatcatgtcccatccctcagcagggcacctccctttatttgtccccatcctcaattcctttttttttttttttttaattttaaaaatacagatggggtctcactctgttgctcaggctggtctcaaactcctggcctcaagcaatcctcccgcctcccaaagtgttattacgcctgccattttttctttttgtttttttttttttcgtttgagacagatatctctctctctctctctctctctctctctctctctctctccctctgcctctctctctctctctcttttcccccctcccccagggggagtgcagcctcagtctcccaggttcaggcaatcctcccacctcatcctcagttcctaactccatcactgtaccttctccttgtcactaactggctttagtcacaagaagccaccagctcccctaactcctccagattgtctgttaatcatagtcacagtaactatgtctgtctccccatcagagtgctcttaaaggctgtttttgtctgtctcccctttgagatttcttcttttcccttcccctgcaagcaaatcgggacttgtacccaaggatcctgaggagtgggatgatgtggctttgggggccttggctggagggccagctgcctgttagtcatttccttgatggtgggctgcccctttctctgttctagattttcatcgtggaatttgggggtaaacccttcagttgtacaagcctcagcctgtctcagtggctgtggtgtctcttcattgggattggagaacttctgtggggccaggtgagtaccggcacaccctcctggtgcattctcacagcctgcagaactcccctcctctacatgagatggaacaagcaacggtggagaccccccagctcctcatcttcatcttctcctcttccctccccacccccactcaagttttcaagttcttgccatctcataggatctcaaggtggaatgatcacttcagaggtttcagaattcttctctaactaagcctggaggtagaaaaatcccttagcttggctgggcgcagtggctcacacctgtaatcccagcactttgggaggccgaggcaggcagatcacgaggtcaggaaatcaagaccgtcctggctaacatggtgaaaccccgtctctactaaaaatacaaaaaattagctgggcatggtggcaggtgcctgtagtcccagctactcgggaggctgaggcaggagaatggcgtgaacctgggaggtggagcttgcagtgagccgagattgcgccactgcactccagcctgggcgacagagcaagactcagtgtcaaaaagaaaaaaaaaagaaaaatcccttagcttctctgagacagaaaccaaacttttcaatggaattttgctacaaaaaaaaaatatataataagggtcttagaagtagaagagtttacaagacacatgtctttattctcatgaggcagcaacctggctatgggctgtcgagctgacataattcagggtttccagcctcttctctttcttgccatggctttatctgggtggaattcttaactcttacctgagataaattcagatttacaagatctctagagtagcagtatggcctgtggttcagagcatggactctgggaatgactgcctgggtttgaatccagctctctgtttttttttttttttttttttttttctgagacagagtcttgctctgtcacccaggctggagtgcagttgtgtgatctcggctcactgcaaactctgcctcctgggttcaagcaatttctcctgcctcagcctcccaagtagctgggattacaggcaaccaccaccgcacctggctaatttttgtatttttactagagacggagtttcaccttgttggctaggctggtctggaactcctgacctcgtgatctgcctgccttggcctcccaaagtgctgggattacaggtgtgagccaccgcacctggcccagctcttgttgcccaggctggagtgcaatggtgcaatcttggctcactgcaacctccaccctccaggttcaagcaattctcctgcctcagcctcccaagtagctgggattacaggcacccaccaccgcgcccagctaattttttgtatttttagtagagacagggtttcaccatgttggctaggctggtctcaaactcctgatctcaggtgatccacccgccatggcctccgaaagtgctaggattacaggcctgagccaccgtgcccagcctcagctctcctttttataagctgaatcatcttgggcaagttacataaccaatctgtgtctcagtgtcttcagcttaggaaaacaaggtcattgttaattagtgaatcagttactatacagtaatgaataatgtcttattccttataaataatcaaattttaaactattacgattataatagtatcattaagtctaatagtttcacttcttccttaataccactttacaaacctccctcatcctcagctctggcctgggctatacctctctttacagaccccaggtctctgcagataatcccttagtgtccagccacccaggtaatggacactttgccctaactggcctcaaagagccatttctggagctgcaggccttctcccctaaacctgctagttatttatttcatacctagatgcctccctgaataatttctttttcttttcttttcttttcttttttttttttttttttttttaagagatgggggtctcaggccaggcgcagtggctcacacctataatcccaacactttgggaggctgagtcgagcagatcacctgaggtcaggagttcgagaccagcctggccaacatggtgaaaccctgtctctactaaaaatacaaaaaaaaaaaaaaaaaattggccgggcatggtgacacatgcctgtaatcccagctacttgggaggctgaagcagaattgcttgaacccgggaggcggagtgcaatgagctgagatcacggcactgcactccagcctggatgacaagagtgagactctatgtcgaaaaacaaaaaataaagagattggggtctcactatgttgccaggctgatctcaaagtcctgggctcaagcaatcctcctgcctcggcctcccgaagtgctgggattacaggcatgaaccgctgcacccagccctccctaattaatgtctgacccaattccctccaccctgttctgtttggtgaagatttctttttttttttttttaccaatgggttcctaaagcagttttatgctttggtaaagcttggttgttaaacctgttgtttgaaactctgttctggctcttgcctcacatgtggccatgtggccttgctgccagacagcagccttccttctgtatcacaacagctttttccacattcagaggcagagctctggcattcttcccatttcaaaacccttgactccatatcagattgcccatacagtccctcttccccacatgagccctggctactccttatcttgtccggaaagaactgactgacaggtgctgagctcaccgggaaatttatttcaaatttcaaaccctatgtactgctccttgtcttctgataatactcatgtgacccctcttctatggactgtcccatccacttcctcacctcaagcccaagaaaacttttggtatcctttcacaagagtttgtaacacagaaactactttgcatgtggcaactaagaaaggggtcattcatttccaatacccttctcaaccccttgcctatacataggcaatatcaccatcttctccccaaactcttttcccccaggtcctggtctctgtttcttcctactgcgtaccatgctgtatagttctgttaaccttaaaagacagattgcaaaatggaacagaagaaatgagacagaaagaggaaaatgaagtatatgaccaggcagatggctggtcaattactagaatagaagctctcttttgtgtgtgtccataaatacagaaaaccttcctaaaagcctgaccgctggtgggcacttggagaatgcttgcctggatggattggtgcttctgcccactgctcttccagtgggaagggtggtagggcaaagagtaacctgcccaagggcctggctcatgtaagttgactgacagctcttctcacgctgattctgacgtcttcctcttcgctgcgcttgttttcagttcatctccgcaatacctacccgatccctgaagttcctgaaggaggctgggcatggcaccaccaaagaggagatcaccaaggatgccgagggactggatgagattgaccatgctgagatggagctgcgccgaggccagatcctctggttccggggcctgaaccgtatccagactcaggtactctgatagtggtctgtccttcccttgggagaagcagcttcccatcttggaaggtgttgggagggtagcagttcttgtcggccagcatctcttcccttccaaaggctcactactgatgggcagccctagatcctcagcttcaggacagacacgcaaaaggatctgtgtggggtcctctgagaggagaggagtcaaatgacctagaccatgggacactattagcatagtcctttagctctgggttgaccctaaagcccagcctgccaccctctatcaaatgggcaagcttcagcataaggtctcttgcaagcactagacctgaccccagggtgggaaatgctcagtttttccctacccttcagaaggaaggagttagacaatatcaatatgccaacatacccagcattcacttaatatagcttcctcacactgccattataggaatagatgctatctggaagggtctttgtaaaagaaactcaccttgttatatctcccccattcaaagtgtaaggccatggtggggaatctgatggtttcatgtgtaaaaatgacaatagtctcttgatgtctgagcatcttttgcaggattcagacttgcttcctgacaaggaggaagcaataatttcttcaagcctcttcccttcttgcaatttctgaaatgggatagaagccacccctgctgctcttatgtcccctgtctatagccccacaataacttttattttttccactttccatgcatcaattgtaactactttctcctgggtgaatgcgctgatctaagcattgataattctgtcttcccctgctctcaccccccatagctttattgttttaatcctgagattttccatttcaaaaacactgtaaattccaagatctcaagggtggtctccagaaaacaggcgtatttctctctgctgattggctagagatcttcaaaataagtttcactgtctaaaactggccttgcaaatgttttagaaagttccccagtcggccaggcatggtggctcacgcctgtaatcccagcactttgggaggccaaggtgggtggatcacctgaggtcgggagttcaagaccagcctgaccaacatggagaaaccgcgtctctactaaaaatccaaaattagccgggcgtagtggcacatgcctgtaatcccagctactcgggaggctgaggcagaagaattacttgaacccgggaggcagaggttgtagtgagctgagattgcgccattgcactccagcctggccaacgagagctaaactctgtctcacaaaaaaaaaaagactgggcgcggtggttctcacctgtaatccagcactttgggaggccaaggcaggtggatcccctgccttaggtgaaaccccgtctctactaaaaatacaagccaggcatggtggcacatgcctgtagtcccagctacttgggaggctgaggcaggaaaatcgcttgaacccaggaggcggaggttgcagtgagctgagaccacaccattgcactccagcctgggtgacagattgagagttgtctcaaaaaaaaaagagaaagaaaagaagttccccagtcaatcccacctcgttagtgtataggagagatagatggagtgaatattctaaactatatacctggtaggaacttatcccctataggcaagacaacaaatagaaaagtggaaaagaggccgggtgcggtggctcacgcctgtaatcccagcactttgggaggccgaggctggcagatcataaagtcaggagttcgagaccagcctggccaacatagtgaaaccttggctctgccaaaaatacaaaaattagctggacgtggtggtgggcgcctgtaatcccagctactctggaggctgaggcaggagaatcgcttgaacccggaaggctgaggttgcagtgagctgagatcgcgccattacacaccagcctgggcaacaaggcaagactctgtctcaaaaaaaaaaaaaaaaaagaagaagaaaagtggattgcagactcactatgcacctgactgtacttccaggcaggtgctttttctgtctgccagagaaacattccagggtgctgtggctgcctcacctatccagggcgatgcagctccctggggacacaggtgcttcctggggagccctgagcacttctccgtgttgctggcctcacatccaattgggcaggcattggagtccgggcactgcctggagctcaccagaaggtgctttacagtggtccttggtttgtctctcagagggcttggtcccctctgctgtgaggctggactgcagctgtggtggcaagtgaccagatgtcactgagcagcctgaccatggtctaggtggtgcttggatgcatccacttggcttcctttggtcattgagtttcaagaagagaaactccaggagacggcttggccaggatcaggcaaaaacaatcatgccgaaaaagtggcagaaaagcttgaaggtctctcagtgaaggaggagaccaaggaggatgctgaggagaaacaataaatcgtcttattttatttccttttcctctctttcctttcctttttttaaaaaaaaatttaccctgcccctcttttttggtttgtttttattcttttgtttttacaagggatgttatatgaagagctgaattaaaaaaaaaaaaaagaagaaaaagaaaagtggaaaagggctaggtagggaaacgctagggttccttttccctctctcaagttcctcctctcagaaagaaaatttccagcgggacctacacaaagtgcctcgtggcatccaggcatccagaatccccacgctcactccctaccccaccccacactccaggctgctgactccaagtacccatagaacctggcgcctttggctcccatctctaaagcccccagtgctttcctttgggtctgctctttccaaaataacctgtctttgctttgtttttcttcaggatcaaccacttctactatgtgatttcttttctcctagccaagattccctcagtccagtacctccttgctcctttccagtcttctgtcctgggaggctgagatttatgggtcttccttgccctccactaccaatttctatttccttgactatgcccctctctacaaggtctttttggtttcactgcctacatagctttaggtatactacctttccgcattgttggagcatgaggcagttgggccaaaatggcattaaagcctaaagtgaggcatgttcaagatgccacagtgaccaaattcacgccatccaggatgcacctgactctggaagctgatgaggctaatgatgctaacgtgtatcctggatccctgaggtccgctcccaacatcagcccttcagcctcagctgggttctaacaaaaccccctgccacctccacgttgatctttgttgtcattctcatcgcagtgctttggtatgggaggtgttagaaaacttagagactagaattgtggaggttgggaccttgtaactccaataagcactgaagaaggtgtctctacagtcccttcttccatggagctggaacccccgcacccaccccaagtgtaaaccctctcctcctgcaggttcaagctcctcagtcccagggaactaaaactgaataatgtgaggaagcagtgatgtttctgctcaaactgtgatctggatccagaaactagccctaaacagctcatggcttctcaggaagctttataaaaggactgtctcactcacattctgcctactttcccatcttccctcctgggaaaatgaagtccagttaatggaatcagcacctttccttcattcctggtagattaacccttggcattaagcagatagatatttctaagattattctaccagattcatgaaggctaaagggaattccttttgattttgtccttgttacttaggggtcagggataaggatggtagagttgattgaggccctagatcaggaccattgtcagaaaatgaatggcatggccgggcgcggtggctcacaccttaatcccagcactttgggaggctgaggaaggcaaatcacaaggtcaggagttcgagaccagcctggccagcatggtgaaactctgtctctactaaaaataaaaaaattagctgggcatggtggcaggtacgtgtagtccctgctactcaggaggctgaggcaggagaatggcttgaacccagcagatggaggttgcagtgagccaagatcgtgccattgcactccagcctgggtgacagagcgagactctgtctcaaaaaaaaaaaaaaaaaaaaaggaaggagggaggaaggaaggaaggaagctgggcacagtggctcacgcctgtaatcccagcactttgggaggccaagaccggcggatcacgaggtcaggagattgagaccatcctggctaacacagtgaaaccctgtcactacttaaaatataaaaaattagccagcctggtggcgggtgcctgtagtcccagctactcaggaggctgaggcaggagaatggcgtgaacccgggaggcggagcttgcagtgagccgagatcgcaccttgcactccagcctgggtgtcaaaaaaaaaaaaaaaaaaaggaaggaaggaagaaaatgaatggcattaattgcctctgtctctgaggaacagggcactgaaaaccagaggctacttgtgtaagcctcgacctgtagctgtttcaaccaccaccaaccaaaacctcttcctccccctccctcagtctaattgccgagttactgtcagcatttctgccagacatttcagatctctaatgcattaatgcacttagtagcattctcgatagtgggcttggccactgggttcttgagctccattctcagggagcctacctacttcagcccagggaagggatagctcagacaagatacccagaggaggatgagcccagcaactcatggcccaggggtctttccatcatggccatttgtatattggctactaaatggcccctgttttttatttaaacacatgagttattttcctggaaaatccgcaaaaatacgtagtcggtttaattgatttagaggttcctgagccttcaaattcagtaatacataatttgccttcagaatcttcaattgtttgccttatttttaagagtacaggtaaaaaggggcctgtaggtggaggttgcagtgaaccgagagtgtgccactgcactccagcctgggcgacagattgagattccatctcaaaaaaaaaaaaaaagtacaggtaaaaacaacgaacaatcgctgtctagctgttaggagtgatggagtagggaaaagtccctttacattttaaatactcttggccccctctaaacctcaaatgcccactgtggattcaaagggaagaaaaaactagattctggctgggcgttgggactccatggcaaattgttccctaagtgaagtatgatatgcaattaacgtttttctccttctcctcaccattgctttttgtgggagggaagctctctcttgctctctcctgtccccttttcccatctacttccattcctgcttccccaaccttccatgaccctcccttcctctttcttcacctctctcggactgactgtggagcaaagctgtctcactctctgattctttgcagatcgacgtaattaacacattccagacgggagcctcttttaagggagtcctaaggcgacagaacatgggtcaacaccttgatgtaaaacttgttcctagttcatcctatgtagcagttgcaccagtcaaatcttcccccaccacttctgttcctgctgtttcatctcctcctatgggcagtgagtgatagtctattatgatgcatgatttgctaaaatgaccacaagagagcacgtggcatccactttaaccaaccatggttatcttttccttttggtttttccctttgatattttgacttaagggaagaaaaagacaaaaatcctactctaaaaccagactgtgtgcccttgtattttatttttgtaatgtagaaaagctattaaaccttaactgttttaaagacaataattctgttttctgattgttcctctgcattgctcatttcttccttttcttgagttttgttttgttttgctttgccttttttgtttgtctgtttgttgctttgctgggatatgttgttgttcctctcttctcctcctgctcctttgagtctgaactctacctcctaagcttagatgtgaggttaggccagaggaaaacccaagagctttctttacatgggggcaaagtttgggatcttttgaggaaaggtaggaagggagctaatgtgcccatgggtgtgttttgactagtggacctgtcataattgagccagtattaaacttggtcaataataatagtccatttggccaccactgtattgctgactggcaattttagcataaaagttgtagctggctgggcacgatggctcacgcctgtaatcccaacactttgggaggccaaagcagatcacgaggtcaggagatcaagaccatcctggctaacatggtgaaaccccgtctctactaaaaatacaaaaaattagctgggcgtggtggcgggcacctgtagtcctatagctactcgggaggctaagacaggagaatcacttgaactcaggaggcggaggttacagtgagccaagtggagagccactgcactccaccctgggcgatagagcaagactctgtctcaaaaaaaaaaaaaagttgtagctataggtgaagaaaagaaagtagttcagttcaaatgtatatggttgaacatccccgttattttacttttctgggactccggtttaaaaatcagttaatcttggctgggtgctgtggctcacacctgtaatcccaactttaggaggccgaggtgggcggatcacctgaggtcaggagttcaagacctgcctggccaacatggcgaaaccctgtctctacaaaaatacaaaaattagccgggcaatatggtgcgtgcctgtaatcccagctactcgggaggctgaggcgggagaatcacttgaacccgggagtcagaggttgcagtgagccgagatagcaccattgcactccaacctgggctacagagtgagactccatctcaaaaaaaaaaaaaaaaaggccaggcacagtggttcacgcctataatcccagcactctgggaggccaaggcaggtggatcataaggtcaggagttcaagaccagcctggccaatatggtgaaaccctgtctctactaaaaaatacaaaaattagccaggcatggtggcacgtgcctatagtcccagctactcaggatgctgaggcaggagaatcgctggaacccaggaggcggaggttgcggtgagccaagatgctctactgcactccagcctgggtgacagagacagactccatctcaaaaaaaaaaaaaaaaaaaaaaacgaagaaaaaaaatcaattagttcacatgaaggtacgagaaatatacaaaagagtcaaaataacattttttcttcatttactaaacttttaggagtttctgaagaggagtgccttttattttgcttctccttttctctagtttgattgtttcaccaatagccagcacttattttgcacataaagtttcaggaagccctttctcagccggacttgcaattggagtattatcaactcacaacctaagatctggtgttcccattggtagattcttggattcttgctaatgcttatgtcttcctattcctggtcattttcccttccccaaatgggactcagagaggagagagaaggtagccagctctttgctgataatgtgggaaggagtttatctgtattaaatataatgtgggtttcaaatagctgagtgttcagtctgttccttcctcccccattcccaacctcaccaccccccaccccgacctctgcaaaggggctcaagaaagaacagttgccttgtctgtggttcacatgatcacggactgtgtgggttgaccagacttagatttgttttgtctctttagccaaagtgttctgatgtgaggaatgggggtggaacttgatagagatacatacaatttctttaggtcaaaaaaacaggcaagaaagaactcactaagtcttgccctgcaagtatccaggaacctctcccaccagttctttcatattcctctcttaattccttttttccttctagttctgccatccccttctaactagcttctgttctgttttaatcatccctttctgataggaagggttagtgtcagatatcctgatggtttgatggtggaaggagactaagtagaagactaagcagaagactgggatcttgtagagcagctggtagagggtgtgctccaaatcctcaaagactagatcagaggagagacaggccacacctgctctttctccagctgtgcctttttagttggagctcctagaagttatagccatacattttaaaaccctctttcccattccagatctccaaatgaattcaactgtttgtccaaccttcattagatagatctctaagatttccctgcatagggaggccctaatccttttcttctggtttctgaaaagagcagaaaactgcctggcgcggtggctcacgcctgtaatcccagcactttgggaggccgaggcaggtggattacttgaggtcaggagttcgagaccagcctggccaacatggtgaaacctcatttctactaaaaatacaaaaaaaaatagctgagtgcggtggcgcacgtctgtaatcccagctactctagaggctgaggcaggagaatcgcttgaactcgggaggcggaggttgcagtgagctgagatcacgccattgcactccagcttgggcaacaagagtgaaactccatcccccccaaaaaaaaaaaagcagaaaactacagaatgagaaaatggagtcttcacctgcccactcattgagctgcagagagtagccctcagcactcatacccagtctcctgagtcatgaaaagagttgcccttcaaccagccacttccacctgtaggccagggccccaaaagagacatttccccaaggttttgagaaatgatgaccaggaagggaagggttgactggctgtgtggagagtgctcaaagctttccctgcaccttcttcactagccctgtcttgtccccatacactgctcatgcaccaggcatcatgctccaggaaggggagatgccagccctgggtggattggtggtgatatagtgcatgattgttcatcagcatgtgttctctgaggccagtgctggagttggggcatcctggcacagccccatgccctctcctccctcacccttctctccacccaccaagccagctggtgctccctagctctctgacccctcttcacgtgagcttccttacaggtggctggtttccctttagattccagaagtcctgcagtctagctggatgactgtttcttgctccccaaaagacatttcccatattttttccatctacccatccccaattcacttttatcttcctcattgtttacctgtaacagtattattggtcaccccaacaggtgagaggaaaagccaacaaacagggctccagaccctcactccaaccccagttgttacaaatttattttctatagtggacttcacatgtaattttttccaacaaagtattcaattgaatggaagcaggaaattgaaaatcactgatattgaagatgatgtactggcggataaaggcacctgccctcctgtaatattcagtagaaattttgagatcttgaaaacatatgaaaaatgtgggctatgttatcactcctgacagtgatggctttgatggagtgggatgactttggacccatctcttggccagtgtatctgtgccagggtcaaaggagaaggcactgggtttggactcactcaatccaaattgccttgctctgagattttatgtagatcagtgaaaacttgagacttcctgaagaccagatggagcctccattccatctgatctcacctagatctggagcaaaggcaacatgataggtaaaatttgcacatcagatggtcaaataggaatcagataataaaaatgtggtcctcgctgtctgttcagcatggtgagtgtgtgcctgtgctccctgattcttcttggctgaggtgttgagctgatactgttgagtggcaaggagtcctttgccttctgagctttgagcaccctcagtcttgggtgggtctgcaggctgtagtagagtgggacgagataaagaaagccttagccagcagagacacattctcctccagagaaaacggaccaacagtattgatagtgagccttctttgagtggtatttatgaaggttctgtatggtggtaggaagcactggaacaggtgatccaaccagtttatttggctgactctctgtatcctctgctgtctccaaattcttgtgtcttctcctggaatatatttttggttaaacagcagaggaatgaaagaggtaccctacccccaccttcatcactcctacccctccaacctcaacagtttcccccacattactcccatttcttttctgagtgaagattttttggacaagactaggatcagccaccttccaacaactagaaccgtcctacaaccatttacctttcccctggcccctctctccaacttctcggagctccaaccctctccccctaccccaattctaccatccctgattctaagccacgcctcagagagacctgcagttcagaaaagcagagctgccaaaattgctggtgcctgtggacaagcaaaagctgttcacaggcatcaattattgtcagttttttcttgatgactctgaactgaccgaatcccttcctttttgcgcagtaagacagagactatgacactgggcaatgcatctccttttgcccagtaaaaccgcacgtggtttcctttccttcatcctcttcatccaccccatcagaaaggccacttgtttgtagcactgcctcctggattaggtttctctccctggtccctttcattcccttctccacataagactatgctcctcttcacaatttggaaacagctagagaaagcagcatgattgggcacagttgctgtgtatcagagacatgaacgtgcatttgaattatgagagccaggtcttttctcaataggcaggaggaaggcatcttttgacacctgtattttatctgctgcttctagggaaggggctgaaggagtgaagttctgtgttatttgcggggaggggacacagtggtggttgtgggatataaaaatatgcatgtttcctggctgaaagggcaaattattattagagagttttaagttcctgcatgctgctgacacaaatgaagattggtttgtctgcctggctgcacagttttcatggtcactcgtcacccaacctgtattatgtgcagattggtgtatgctggctctttgaggtctttaaacagataactaaacctcaatgcataatttttccattccacattcacaaaatgtttggcctcagcacagaaatccacatatctcaatcatctttttaagtttggctatgaatttgcatctagttcccatgtccttgccctccatctaaaagaactaatgaaacttcttgttttctgtttcattttaaaagtagattgtttgggaatgctaacgttgctttgggttttctactttttttaatgcagctttcaaaacgtcctagttgccgtcactcaccccagcccaccccactgcttgaaagttgagccatgtgatgtttctagtgccccatgatctcttctgatgtgtgtttggttttgatgctgagcagtcatgttttatagtctgggttttgtttctctcctaaatccaccatctccttgttctgccggccaattctcacctctctattttctcatcctccttttccttcccctggtatagatcaaagtggtcaaagcgttccatagttccctccacgaaagcattcagaaaccctacaaccaaaagtccatccacagcttcatgacccaccctgaattcgccatagaggaggagttgccacgaacaccactcctggatgaggaagaggaggaaaatcctgacaaggcttctaagtttgggactagggtgctcctgttggatggtgaggtcactccatatgccaatacaaacaacaatgcggtggattgcaaccaagtgcagctcccccagtcggacagctctctacagagcctagagacatcagtttgaattttctttctctgactctcatccctattttacctatttccattttcgtctatcccatctatgaggtgatgatgggacttttcattgtcacgtcagctgctgtgttaacagcagtgtgtgtgaagtgaacctctacctgaccatgaagaggcaagagcacagacttacaaggatttcaacttaagcttgacttggggtttgtagcgggacccagtcaaaccccattcaggtcatggtagaatctactccttggtagtcacttgtcatttttaaagaaatgatgacaatcctcttggcatcaccccaccccacattctccccgatgttcctctcctgaattctggattttgtcctacaagtctgtgccatttataagctaagttgagggttcagagggagacaaatatccccaagtgaaatatgttgcggtagagatggaatgtataaaatccgccagtagtgtgattgtttttcaatttttcccactttgaaaacttacacctaaaggcctgtaggcctctaactctttctgccctttcattcaaacctctccaaagttctttgtcttttgtcttcccttcctttccttttttttttttttttttatgatgattaagaaaatggaaaggatatggatgaattgtgtaaacttagatccttctcccttttggcccaaaagaacccttgatttagttccagaatccaaccagtttctttgttaaaagggtccttttgaagcaattaagtgctggtaagaatatttctctgttgttgccaggttaccttctgcttttaaattgccatcttgtaaagtgtatgtggttcttaagtgccagggagatcagccttgcccatgaaggttgcatatgtgtggtatacagtttttacctgaaagcctgagctttctcttattcctaaagtggtggcaaaagaatgaactgggtatgaccctgcccccttactgggcttggatattgaggaccagacgctgccaaatctaggacaagacagaccatcaaagcagacttttgtgggctcctctttggggtgaccactgctttcaaagccatctgccaaggctctccagggcaggacctgactggtggggaatgagtgttcagaagccttgggagaggccaaagagccattctagcatgatctgagaaaaccttcctgcagaggccagaaaccttgagcttaggtgcctggggaccagcttcgacattctctccagtttctgattctaatttttgccacgtgtcacaacttttccagtctctgagaaggtcccagcctttctcaaatattctgattttgaaaatatgtatccaaagtgggaggcccctgtgacattttgccaacttaaacgagaaaaagaccccccgcacccggcacactcccccttcctccagccccgcttcagccacatgctccagctgctgcccagtaaagccctgtgcctttttttcccctgaatactgcccaaagcatccccttcccatctgcctctcaggagttggggactttgctaggagattttttaagtgttccttactgggacaacgtggagccacgtttgcaggagctccatttgtatccctgctggtgttgacttctgtgtaggggccagttcatgtccctgactctcacctcccattagataaatgaagcccacccccctttctagagtgatgagagtcaagaagaggggatgtatgaacggccaaattcccatgtgagaggaagatgacctgatccacctagccttttcttctggatctgtcctccctcacccctttcacctgagctgtccacagtaggaaacataaagaaacaatgtcccctacatatccccatgactacataatccatcatcgtaggaaataggaaagcaaatttgattttggttttgtaaaacgtacatgcttcaataattcttttttgtgtcttaaatactcataggggaaaaaaacagctcacccaaggtgttaggtttcacatatatattcatcaactattttagaagatttaattctatcaaatcttgtattacctcagatcattttaaatagcaagccaataacgagctttgaaggctattttaccattcctgttcacaaaaggttctcatggtgcctgacaggttacccttgagggcttgtgtctactttttaaaagtcaatggttttttttcttgtgttctagtttccataataggagagaaaatatagaaatatatgcaaaaattatagttttctttagatcagaaactgatatttttgggtcagccatatgtattttgtttaaaggatttaaaataaagtgccgtcatgtagccctgtggaagggagcacataaccagctgtttggcatgacaggtgacttagtatatttgtaattggttttaaaaccaatacaccatactttctttctgcaaacagccatctttatacttagggaagaaaaattgttgggttctagacttttttaatataaattttgttgatatggaattaggtaagtttaagtgtctatgtgcatatgttttttatataagttttttctattcagtttcactgatccaactggcagtgggtaaatatggcataagttaataacacttttccccaaaatggtgctttggatttgaaaagggtctgatggggagaaggagaacgtatcatcctagcttcctctcttaataaacctagaaaaacgggtagtaaactgtggatagtcaggaaaacacccagcaagggacacagctgtcaggaaatgaatcttccccccaacccccaccatgcagatggatagacagaatctttcctgactagtcattaggatcaggggcctctgttggatttgtgtttcttgaagaatagctggcagagtggtataaaagacacgaatatctcctggtctataaggatactctgatttggggtttgcatttttcatggtttttatttcctgttccccctggagttttccattagtgagtttttgtgcaaggatcttatttgtgatgccttccctcccctagaaagattttgtgcaatatattaaatggggacagaattctaaatggataaaacaatggctggttctagccctgagtgacagtcttaaggctagatccttcccatagtatcatctgtcctctggaatgactctcctgtccctaaaggggttaagagagagatcacctagaaatccctctggacacttgtgggttctttagggtttgagtttcttcttccccttgagcttcagagaggagagttggcatggttaaatctgaatggttacctcactgctgaaaacccagaggggcgtggcacactcgcttgtgtggaaaagcctctaaatgcatcccttcctttctttcctgcttcctttgccttacaattgaagcagcccgtggtaccatcacagtatgcagagacttcctcacctttcatatctagggaccacccccgatgcattggtgagggtgggcacttataaatgcctgctattgttaagccattccagcctcttcctctgaatagaccagacgccctttcacttagttcagtgccagtccttttgccttcccaaccctgctgttaggcctgctgttccctttgctcttgattaggagagatggaaggagatgagctcccataactgaattggcctttggttcatgttttctccccatatgtatatatgccatatgtgaatatgccatatatatgtgccaacaaatctatctacgttgttcttttcaaattagcacgcagataggaattttgagtttcttcttcttttagtaactagtataacaagcactggtatttttgtacaaaaaagaaaaacaaaagattgactattgtggtctgcatgacataaacaaacaaatggtgatatcaaagcaacgtataccccagtccagtgtgtgttgccataatttgcaattcagcttaacagtgcacccaatctatatttgcattttgatattatttaagctctatgtacaaggttttgcatgtatttatatggttcttagggaaaaaaaatgctataaactgcaaatctgaaattcaaatgtgttgttccactgagaccagaagaagaagaggagttttaaaagggataatttgttggagccaataaagctttttgctgatgaacagaaaccaatactgctgtgcactgagaataaaaactcatgcccacttgtaactgtgctgtcctcaatgcgtctccacttttgggtaatgccactgattgtctgttgaagttgagaagggaaatgccgcaaccacaaggacaaccccatttaaacaggcacagaattcagcttaccaccagactctgacaacgcttcccttccctctgggccttcgcattggcttcattcccttgcagtgcaagctgtgctccacccaccttggttagaatccacagttcaggagctggagcttttggaagaataagaaagaggcagtcttggcagtccttgctttttttctttcctttttttgttttttgttttttttggttttggttttggtttgttttatatgaaatgtcttttaggagaagtagtttcccttacattagccgcctttcccttgggttctccaccctccccctcacttccctatggtttaaaaaatgtctttcattaattgagtcttgctagagactcatattaggccccagtttcaggtcaaaacagcttcctggcaggtcatttacattctgagctttcatatctgagacaactccttcctgcagctctcatccaggtgcacgacgaagttccccaaccctcttttaaaatatcacagggaggagccaggcacagtggttcacacctgttgtcccagctactggggaggggaaggggctgaggcgggaggatcgcttgagcccaggagttcaagtccagcctgggcaacatggcaagaccccatctctaaaatacacacacacacacacacacatcataaggaggaaaggaccttgtccactccccaaattcctttaggaaaagcatgacattgaagaacgccccaaactctcctggctattttaatagtctggctctgaaagaggatctagccctggttgaaaaagacttatggccgggtgcagtggctcacgcctgtaatcccaacagtttgggaggccaagatgggtggatcacctggggtcgggaattcgagaccagcctgaccaacatggagaaaccccatctcttctaaaaatacaaaaattagccaggcatggtggtacatgcctgtaatcccagctactcggaggctgaggcaggagaatcacttgaacctgggaggcagaggttgcggtgagccaagatcacgccattgcacttcagcctgggcaacaagagtgaaactccatttcaaaaaaaaaaaaagaaggtccgagcgcagtggctcatacctataatcccagcacttcgggaggccaaggcaggcggatcacctgaggtcaggggttcgagacgagcctgaccaacatggagaaaccctgtctctacaaaaaataaattcagccaagcgcagtggctcatgcctgtaaccccagcactttggggggccaaggtgggcggatcatgaggtcaggaaattgagaccatcctgactaacacagtgaaaccccatctctactaaaaaatacaaaaaactagccgggcgtggtggcaggtgcctgtag

SEQ ID NO: 51 - DNA, 274810 bp, Homo sapiens
  source 1..274810: mol_type = genomic DNA
gagtcactgagcccatccagcctctagagctttttaataaactttcactcctgctcttaaacttgcctcgatctcttcttctgccttatgccccagttgaatttttctgaggaggcaagaactgaggttgctgcagatctgtataggtttgccaccagtaacttggataccttccactggtaacaccttgacctacctcccaagctcaagcgatcctcccgcctgagcccaccaaatagctgggatcacagctgcgcaccaccatgcccggctacctttttttagggacagggtctccctgtattgcccaggctggcacacacttttctttatagctactgtcatcatctttcgatcacactgatgttcttcactttgtctcttgcaatagcttcccactgattcaccacacagtggctagagtgcccttttaacagatcacagtaccgtggccctccttaaagcccttccaaggattcccactgaattggacacaaaattcaaactccctaaaggccttctgtggcctcgtccctgccctctgtccatctctctgcccctggtctgtccacaatggacgctctttaggcttcaagaagtgatctctgccttcagatcacttcttcagagagaacttcctgagagctgcctcctctccatcgtaaatgtctctcctgttactttctctcacagaattcagttctttccaccatagcatttgccacaatccgtaattacacatctgatcatgtgtgtatttatttgctttccttctcactgggttgcttccagaaagcagctgggatcgtgtttctcatccctgcgcacagagcgcctggctcaggggcaggcacagagagggtgctctctaagtactcgctgaatgaatccactgtcttctcttctcctcacagtcgtctcctgcctcaaacgcaggtctagcagaaaggctcttttggtgagaataccttcacccccggcaaaaaaaaaaaaaaaaaaaaaaaaaaaaaaaaagaaataccaaaaatttaaattttatgaaaacccgaagactttgttttacaaacatataaattattttatttacaaagccatgttacaaaaaaaaaaaaagcaaaaaaaaaaaaaaaatacaattgcttactggagaatatttccaggcctggtgaggaaccatggcagtatcaatagatacatgtttgttctttccttttaaaactgtaagccatagaatttactatttacacctactttagacatttattctgcttacaatatcacaggcatggaatgaactctatctgatagtgctaatacatagaggtgcgggacgaagaaggaaaatacttagtgttacaaaatatggattgtagaaaagaaacccactccacaagtgtggcatttgtttagaatgatcggacatgctttcttcaaaatttttctggaaaaggttctaaaattggtagtaggaaaggacaaatgagcaggtgcaaattcttgtctgtgcaacaacagttatttaatataccccatgactgaccagctacgtaaaacccacagagttttgttaaagtgccatgggccgacagcataacaaaatataaggtgtaaatagaaaatttctttttttccttttttaaaacaagagttcactgagaatcagcaataatagaatatgctgtataaactattctctacaaaggttgatcagcattatttacaattggtacattgatacaaaagaaggcatacaagttatccaagtcgcttttttttttttttttttttttttatggctgacaggtctatgcattgcgttatgcttcacaaccagagctttcgagcctctatggctggcgacaagtcaggagatcttcaggcaaagaggggtgtgtgcagtcaaggggctgggagagaagactgagtgggtgtgcagaacagaaggacccagaggacatcaccctaaaaatgttttataggctgctccagtttaactccattaagacaaacccaaagagaaccttttatttgcattccatttttcaagctgcaagtttttaatacatcattgtaaagtaaacctgtggttgactgccaaggaagaatactgtgggctttccctttttgcccagttttccagaaatatcctcaccttggtcatagccagtcttttgacaaagtaagcagcattcgatgagggtgggggggggggtgggggctctttattccagcttccaattcaagatgtagagagctacaatgtctaaacctattgaattgctcctttagtccttgagacattatttctcagaagcagccacttaatctctcaacctttgttttccctctttgactataagagtttataaatcagagggttattttgttgtggagattttgttttttgtttttactcctgcaagttttacaactcaaaataaattataaaaaacaacagacctctgaaaccgaacaagacaaaattgtgcaaaaataacaaagatatgtacatacttttcagtctgaagaaatgtacaataaaaacataattcaaagaacattttaaaaatataaacattgcttaaactttcctaagtttcatattgtttctgaaactattctggtcagttagctctgtaatatagtaaaacataaattattacaaaattaacactataaaaatttactttaagaatatcttctaaactttttttcaaagggtctaaccttgtttataatttcttaaacatttataagtcttaaaatctccttaaccttttttttttaaaaaaagaaaaagtaacaatcatcccttcaatttgcagtctcttttcccaagacgtaaataaaccagcatataagtgcacttttaacactgtagaaataaaaatgaaatcatccgaactaatgtcctggtacttaatatcaactcctgatttttaaacaaatcattttatattaaaaaatttagtaatcctataagaaacactcactgtcagtgcaattccattgatgaaaatcactccatttgcctcccgtctttgcaattccaattgtgtggtgaaacttaacagtagtctgatctttgggttgggggaacgggaaagaaaaggaaaactttggggtggggatgagggttctgcccagctatgaaactagcattcatttctgatttaaggatgaaacaaaacctcccagtatctttgctatacatcatatacaaagttacatgattaatagcacagaacacctattttatgttgtgaattcctttcctgattatgattccctactagagcttatggtattgctgtttcttttaaaactccagtgtgaatagttctatggctgcagggctccagcgtggctcttccaaatggctgttcttcactgagcagtggctgtccttaccattccttcatggggatggctgtctctaagacagcaaaagctgatccatgggtgtgctgatcccaccaagtccctgtggcccagggcatgggggtgggtgggaaatgctattatttattctgacaaaaggtttgacacatacccttttgtggaagctctccctggggggctcttcctagcccaggaaggcagcctaagaacctttagcagctgtggtcaccgtgcctcctcatggagtggctttctgggttctcacgacctttttcctgggatttctccctcctagctcaccctgctgtgggcactggcacactgattcctggaagggattctgcagattcctgaccagctcagaccaccacagtctccagtttttttagggatcatctcctacccaccatgctctgcttgctgccaccttcccaaacctgttctggcccctgtccctgactggtttatcctttctgagctgcacagctggacagtggtattaggtaaaccacatcactaaacggccactgttctcaatctcgcttctagcatttggctccagccatggtgggctgtggaaactggatgagggaaccccacccaccctccaactctccactcccagctcctccccagcaaagccccctctccctgcacacaatcctgaggggatcctatgagagccaggtcctttgaagaccagtgaggacccagagagtggtagacgtagggatggaaggaatcgggtggagatgacaggaagaaaaagggctctgcctgtgctacagttcaagagcttcagagcatgccaacctggaaccaacattctgcaatgtctgctctcatggctggagcaaaaggatggtacagtagcagcatcaggagctaggggagtgaccccaaatttggaagaatgtaaaaacatggcaaatgaaaggaaagacagcggaaaccaaacactggaactgttttctgtaaatctcaaattcaccttcttttgcctttttaactaaaaattggtcaattaaaaaaagaagaagaaaggccagagtcacagggagtgcacagaaaacagactctccccccagcccactcccctccctcctcctccccatggcctcctcggatgggattaggtggcctggaattgatgtggaagtggcttcatagtcttgttatggaagagtccttatcctgcccgttctgtttgtgttcttctaggaaagaaaagaaaaacttgtttcaaaaccatacagttgagattacccatgagaattcaaggatggagacttagttttctcatctataatagaaaggacaatatcccacctcccatatccagcaaagggcagctggaatagcaagagatgatggatctaaaggacccaatagcaaatgaggtgacggatccatgcatgtaaggcagtcacagaggtcctcactgtggaggaaaacacaaggacgaatgccgcggacattcctgggagtcctctttgggagagtggacagaataattgatgccttcatttttgttctccattagttcaccttttcctacctaacctatagatgacactgcaaattatctcaggaaggattctagtgttgggttaaacacagaggctctggagagagagattttgggttcaagttacttggcttcttagtgtagccatcttcatctgtaatcatcttgtccctcacagggttgtgaaaaggtttaaatgtgtgtagcgtgtgtaaaggacacagcacgtagccctctctctgcaggcagagagtgctacacaagtggtggccatttgtgtttgtcagggctgattgctggcattttgggttcccagcaggtgtacccggagctatgggcacatgcaggctgtgtttggtgagggtgaagtgtagtctgtaggtacacatgacaacctctacaagaggccccatcaacagaggctgacggcctgagtataaatgtgccttcccaccccagcacacatgaagggctgcaagtgttctggcacaaaaaggactcaaaatggtgaggagactctccctggcctggggatacaaaaaccatttccccataatctttacccaaactctacccaagatttgtgggaaaatcccaaagggcaaaatacacacacgttgctattttgttatttggtgtctacaaaacatgcggtacatctcaggcaacataacaacacggttatatatacacgcacacccacacattttccaatcatgtgtaaggggcaaaaccccaccccccaatccttcctggtcctccctagacacatatgcacacactccattgagaaaatcatttatcacaggtgtacacaccgactactcttatacatcaagtttataaaaactactaagtctaccctgaatactgctgccatgaaactgcatcctgaatggtggctgcagctcatcagaggcttttgagagagtgctgatggacagacaccatgggcaaggcctccccctcctctttttttttttgagacaaagtctcactctattgcccaggctggagtgcaatggtgcgatcttggctcactgcaacctccatctcccgggttcaagtgattctcctgcctcagcctcctgagtagctgggattacaggtgcgcaccaccatgcccagctaattttgcatttttagtagagacggggtttcaccatgtgggcaaggctagtctcaaactcctgacctcgtgatctgcctgccttggcctcccaaagtgctgggattacaggcataagccaccatgcctggcctaaaaaaaattttttttgagataggatctcgctctgttgcccaggctggagtgcaaggtgcaatcacagctcactgcagcctcaacctcccagacttcagtgattctcctgcctcagctgcctgaatagctgggactacaggcatctgctgccatgcctggctatttaaaatttttgtagagatagggtctcaccatgttccttaggctggtctcaaactactgggctcaaaccatcctcctgcctcggcctcccaaagtgctgggattataggtgaggcatcatgcctggctggcaagtcccttttttacaatttttttcttgagacacagtctcactctgtcacccaggctggagtgcagtggtgcaatctcagctcactgcaacctccacctccctggttcaagcaattctcctgcctcagcctcccgagtagctgggactacaggaacgcaccaccacgcccggttactttttgtattttttagtggagatggtgtttcactatattggccaggctggtctcgaactcctgaccttgtgatctacctgcctcagcctcccaaagtgttgggactacaggcatgagccaccatgcccggccgcaagtccctttaatcaaatcatcttctttaattttcacaatagccttaggagggaagcattaattttgccttttaacgaatgaaaaaaactgagactcagagaggtaatgtgcgtacgctcatacagctggtaataatagctaacacttgtgggtttactgtgtgccaggcattttctagtggctttacatgaataggctaatcctcacaaaagccataaaaggtaggggccagtatgatccccactttatagacagaggaaatggaagcacagagaagttaagtaacttgcccaagggcacacagctaactagaaggcctaggtttggaagccaggtagccatgctcttaactggagatgaggtttgaatcagggtctgaccccagtgtccaaactctttccactctgctgatgaccatatgaatttttgccccacccccaccctcagtaacttacctgtcggctgtgtcctgggctggatatacttgaaggactggattgtgacaaagctaggctgctatttttcccaacctgaaagacaccattgaagccccactcagacacacgagccagcctgggaagggcccgccgatgccacatgttctaggggaaagaagggctgcacaatgcctccttcattccctcagattggctcggaactggtgtttccatcttaagtggcagagaaaatgaaaatgttgcagagggtgccttgagggatgccctctccttcccagaggaaaagtagaattgtggggactcctcatactgctccctagctggccgggacagaacagggaaggatgaggacaaaggcatctggtggagatgcctggcccctcctgggagcttcactcagcagaggctgggcttttctacctgtggccaaacggtcacacagctcatatacctctgaccctccgtcccaaacccatcttgtttccagcccagactccctcagcctggctgcagataaaacacctggatcttttgctgggtcagttttcccggctaggagatgtaacgcacacgcaactgttctttaggaaaatagcacgatggtgctgggcttctccttcatgtggatggaggacaggaacgctatgcatgcgggtgtggccactgtgcccttccccttcctctgggactgtccttcacacaatgggcccggtccttggggaagctgatgccaggcactaaccagtccctgtctagtctgcaaaggcagcttgaactttcatcctataaaccgctcctcttctccattaacttgcctttatgtaaagatgtttgccttacattattttatttatttttgagacacagtctcactctgttgcctaggctggagtgcagtggcacgatcttggctcattgcaacctctgcctctggggttcaagtgattctcctgcctcagcctcccgagtagctgggattacaggcacgtgccaccccacccagctaatttttgtatttttaatagagacagggttttgccatgttggccaggctggtctccaactcctgacctcagataatccacccatctcggcctcccgaaatgctgggattacagatgtgagccaccacacctggctacattcacagtcttgattttttattcagtttaatagccctgtggcaacttctggccttatatcaaccagatacaattaaatggatccccaaattgttctcaaagcaaaggtttatcttggatttctcaatctcatgcgttgccccgaccccgatctcctagcagaattaacacagatcccaagggcctttgcctttactgaatacttggaaatcaccagtgataaagccttttcttaatgccctgctgacaagcaccgaggtatcacctgcgttagagaaccaatgctgaccatatccaaggcagccgttaaatgcatccgtttttttgaattccctcctgatgagtacttggctgctcctttcaccaccgcttctggctgactcagcatttactaagcatttcctacagtcctgcagaccaaagtatcaacagagccacatctactcaacacagagggactctgttaatggcatggaggctaagaggccagactccagagccaaaatgcctgggtttaaatcctagcctaactactgcttcgctgtgtgattttgggtgccttgcttaaccctcctgtgccttggttcacccatctgtaaaaggagagtaacagcaagtaattataaaatgagttaatacacctgaagtgcttggaacagagcccatcatctacgtgttagctgctgggactgtatctaaaatgagtgagataccacggccttgctgttcaaggcgtggcctgggaggctgttagaaatgcagactcccaggcccctgcccaggcctgctgattgagaatctgcatgttcacaagccccccgggggattcgtgtatatgttcaaacttgagaggccttggctctgccctccatcctgggacctggcggtggcacccaccagcagtttagcctccagggagagccctgtgggtgccagcccccctccctcacacccctggccatggggagtcagaacagtgccctcagctcgagcgagaggacctgtgtctcccgctcctctcaccttggcctcggtttgcagcttgtctggcccttgggttccaaacttgctgtttctcatgtgtttgtgatttgtgaatccccctcaggctgtgctcttcatgaggttataacaagtctcataagtggtgacataaaacattaaaacatcttttaacaactgcctcccattgctccaaagtcctcaggtccctagatggggctgggcttggggtttggtggccttgattctgtgtaacggtctctggacacactgccctgatgggtctaggctcccgggcaggttggccggccctctcgtcagacctggctccccagagaatccgaggccaggcccttccccacgtctgctccctcatctctatgcccaactggcccccagaggctggggcgggggtggtggtgggctttcctaagtagccccccagccggaggagaaggactagactcagggatgagaacagagctcaagggaaagaaacatgtatccttcccagactgcgccacactctctcagcttcctcaccatacacactcctatctgcaccatggcattgaacacttctttgccagctggtgacagttgcagtttttctttaggaaggaaagaattctattaggaggaggtgggggtcgaggcagcctaggaaagtgggaaggacaatcacccgggagccgggcacaggcgctcccactcccaggtgggaccctgggtcagcatttaacctgcctgggcctcaagctcttcctaagggggttccaacagatcagatcaaacctcttagcaacagaactctttaatgacaatgttctcagaacctcaaaagataaaactgaccgatgtggagtggggaactcagaatctctctgtgcctcagtttactcatctgtaaagtgataactgcactcactgcactggggtgtcgtgaggactcagtgaggtaataaccgtaaagtgccgagaacagtgtctagcacatagtgagcgtggtatcaagtacttgttcagtaaagtgctctcaaagcagagggtgaaaactgccttcggggaaaacgagaacaggaatcaagcttgtgttacctgtcggagccgcccggctaagcaggggcgctgcccagctccccctgccccccagagccggtgaaggcggtgccaggaggtcccttacctgccgagaggaggtgctgttaacgggatcgggcaccggtgcgagaaggctgggcgggttctttttgtgaacgctattcataccaggcattttagtgattttacaggctttgctactagaactcgagttcttacgcttttttccttctgatttgtcaaaagagaggggcagagaagacacagcattgtgtgaggccagagagaggtcccctgcgtggagcgcaagggagggcacagagaggggacaggagtcactgctgcctcccaccgcgcccacctgtctcactatgtccgcggggccgccgggcagcgaggtccgtcctgagggctccagtttggcactgagtgggctcaccccattgtttgagttgtgcacagacaggctgttatagggaggggccgcctgataggagttcaaagcagaactggcattcaaaacacagttctttttgtgaggccctgacagtggagacgagagggatgtctgcaaggaagaggaggaggaggaggaggaggaggaagtcgaagactgtggcttcctttttttgttacttggagactcgtcgctacgggtggacaggtctttgacttttgaggatttgctggttttggttttggatggcttgtgggatggggaagggatgacggctggtatcggggacacggcggatggggccttgaaggttgagtccatgatgctgagggttgcggccacatgagggaaagctgtggtgtgggacatgagggcgctcgggtccggcgatgtcacgaaagctgcgtttgagagcatggctgatgtcattatgtaagaagaggtgagcctcgagctgatgggagctgaaggaagatacacagcactggggttgctgaaaggctgcaaaacggatgctggaacgggggtggtgatgtgggctgctggcgagggcagggggctatctgccgcaggagggatcttcctaaacatgagagaagagtgaaagagaatcagtgagacatcgggttggcattgctcaggaggctcgatgacgtttgaggatcagggctacagaggacaccccggcagaaccagactatggagaatggagccttgaaggatgggagaatctgaagcatggcccctccttatggcaccccccattgcaacatccagcaacctaattttcatcacgcacagtctttcagatccttttctccaggcttggctactggagaaggcctgatttgggttcatgaataaaaggtcaatgttatttagaatagaaatctccccagtattctcctctctcaaccactgcccccaccccccaactctctttttttggcagcaatgaaggtggtttttaatgagaagtgatcatttcacatgtaggtcctggttgcaagtaagaaatgtgaggacagggctttgctacctggacacaggggccggagcttcccctctccacccactccagcttctgcccagagactctcggggctttccccaccctgctctgggctggaggcagttggggaacggccctctccaaggccagcatcctctcgcctttgctgtctgcagcctctggttccctctgcagagagccatttccacactgactcgcggctgctggctcctggtggctgggccgtggagggttaggggtttgggaatggtgagatggcaagttgcccattcccaggactagctttgttttttcctattcagcccattctaccttagctcttgctcagaggagctgtctggggtgtggctgctgaccacaccccacacgggtcttcttgtcccgtgttaggaaatggtgagtgtggggaccctcatatgtccagagaaggagatcagggatttctagtttgttctgaagataaatgtaggatgtggacaggaggagaaaaacaggagggaaggggaaacccactgttttcttctttggtcttcttggaggctggggggtacctcagagcaaactccctggagccaagaccagcactaggctgtggcttactcttggggcctccctgcaaactccatcttctgatttgcgctgggagtgactcctccttccatcctacagcctggggtgctgctgctgctactctggggaccgggaggaggcacacggccacagggacgtttgttcgtgattttgcaggaaagcacatggccctcgggagccaggtaaatgtgttcaagctggtcctttcccatttctcaccttgctccctctcccggtttccctgggaaatcattttcactgtagctggggctcactagcgattaggaactagctttccttctttgaaagcagcacatgaaggtgagcaggcccagagcctgtgccccagtgggctagaacacgtgcaagacagggcctcacaccgtcctttctcttctttggaggccactctcccagctgtagcatcaggaccaggtgccagcgaactctggaaagaggcactgctgagagataaatgtctctcctagcgttcctctctgaagattctgcttttggcctgcactttggtggagcctgtggcatccatctttagggtagaatccagaggaatccttgtccttgaaaacgtcagaccaaagggatcaaatacaagagaaaaatgttgccaaactcacaatggccatgatggcattgagaatttacattctctcaagcctaaagaaggtaagagatcctgtaagcactcagcaaggtgccccataaatacttgttgcaatgaatgaatgagtgaatgaatggatggatgaatgggtaggtggatgggtgagcaggtggattctcagcagcaccatacccatattgtcaggaactatgcatggtgggcaaggactcccatatgatcagactggaaatgtctacacacatccttagaactgtctggccctgcacaaccccttcctaacaggggcagggaacatttcttagagggggaggaacctcccaactttcctgctgcttttgttgccttgctgtggtactataggcaacccactccatctttccttgactcaagtttgcttacactaaagtatagatagaaatacatgtgggcagaggtttggcagttacttggaataaaaagttatttacaaataccagatggctcatttagagaggatcccaatcaatgactttgaatgggatccattttttccattttttttttttagatggagtcttgctctgttccccaggctggagtgcagtggtgtgatctcagttcactgcaggctccgcctcccgggttcacgccattctgctgcctcagcctcctgagtagctgggactacaggcacccgccaccaggcccggataaatttttgtttttagtagagacggggtttcaccgtgttagccaggatggtctcgatctcctaacatcgtgatctgcctgcctcggcctcccaaagtgctgggattacaggcatgagccactgcacccggcctgaatgggatccatttttaatgtctcaatttataattttccaattaaatagtataaattcacacttcaacttgtgctgactagcagagttgaagccctaaatcttaacctggctgacactcaggattgggatgggtgctatttttaggcacgctttctatccttttcttgcctcactactcacaagtggatagcaggggcaggaggggagatagggcaggggagaaatagggtgaggggcatgtggcagctccctgtccccaggagtcccttccccgccaaggctaaacagtttatgtgtttttctaggtgtcaaatggcagtggatttcagctttgctgggctgtgccctggtttaagctttgcacactggcccagggaagtcccacactaaagcccacagatgcgaataaattactgacagtgcccaacctcccctgccaggtggcatggaggtccagatgctgacctggctgaaagagaatactgtgttggcggctcctgatgcagagttaaatgcttgttaaagaaaaaagagtcttggccgttccttttcttcctaatgtcttccacgcccccatcggctgccatccctccaggttcgggcccgccggggcctggggtttgggcagcgaggttgagagggtagcggggtgctacgctctccagagttgacacccaggcagccccaatgttgctcagtgacagcagattggttaggcaagtcctgaacaggggggagggacctgatgccctgtggctcgggtttctgtgcctgaggaggaaaggaatatggagcttgagctgacaggacaccagggagtgaaatacagatcaacacattccttccacgtgtccgggattgacacttccataacacagggagcaaagagctgcgaggatcaccagggctggctgccgtcttggggaacaagagcagaggctcaatcaccaagtaactgagagcacagtcaccccacgtgtagcaccaatttgttgctgtttggaatggacacaagtaaatatcaagggtgccctttacacacactgggcagtcacttaaatgggaagaaatgataagcttctcttgtggcccttacctaccttatagtaaatgttaacatttagtactaagtctgccatgagagctcaattcagacacaaatggggctcacttctcctagaagttcaggtctggaagctctttaggcttccagaaaggggcctaaggtgtcgtagctgcctgggggagaggaggaatcctggaagaggggcaaattttgacttctgttccctcccgtttcttaggaatcccttccttgcctctactggacctcagtgggcagctggggggcctcagctgttgtccttcctggactgtctaggcccagatttatgtgatccatgactccaatggatgatgatatcttgagagctcacctttgtaggagtgggggatggggatacccagtgggccggccttacattatcaagcggcctattatttcttaccaatagcattcttccagattaaggcttcttccctgtttatgaatcccctattaaaatgtaagtacactgggaagtggatagtaaaggaacttaagagaaagggaacctaagttggagtttagggtagagaagtacaagtagaggtgggtggggagtcctaaggaggcgggaagggccaaagacaaacttaaccaacttcacagcattgctcaggatctgccctgttggcaagtgtacagatgttttcacaggacagcaaacaactagaaattagcaattggtccacaaccataatgaaatctttagtttttttttttttttttttttttttgagacggagtctccctctgtcacccagggtggagtgcagtggtatgatctcagctcactgcaaactctgccttccgggttcaagcgattctcctgccttagcctcctgagtagctgggattacaggtgtgcgccaccacacccagctaatttttgtatttttagtagagacgggggtttcactatgttggccaggctggtcttggactcctgatctcagttgatccgctcgcctcagcctcacaaagtgccaggattataggcgtgagccaccgtgcctggctgaaatctttagttttgatattgtagtattaacatcacaaacagaagcatatatatatatatatatatatatatatatatatatttttttttttttttttttttttttttttttttttttaagagagagggtcttgctccattgctcaggctgagtgcagtggcacaatcatagctcactgtgaccttgaactcttggcctgaagcgatcctcccaccccaggcctttcaagtagctaggatcataagtgtgtgtcattacacccagctaatttttaaaaattattttttgtagagatgggggtcttgctatattgcccaggctgatcgcaaactcctggcctcaagcaatcctcctgctttggcctcccaagcgctgggattacaggcgtgaatcactgcactcagccagaagcatgttcttaacatccttagattctctaggagcaataaaaaggccctttaacttaggtaaacagacaatatattatctaacatccttctcatttaggagattaccaacacaaaaatggtctccaaaaaagacaaagcatgtaacacatcattcgtgtttctcaaaaccttcaggcaaaccattaagaagagctggtatttaagaattaatcaagcatcctgacttcagaatcattttgttctatgaaaagtcagccactgacatttatttagaaagttaagtttcaggtaactgtggggcagcttggatcttatattgcacaaaagctgctcacttacttccacatctgtgaattcaggtgtttttctaccatggagtttagtgcgaatcgaaaacgatcccatcttctatcaaacacatagtaccctcgtcccatgaggcgactcccaaatgagcaaaactgtgaggaaaaaaaaattttaattttgattacaggttaataagctaatataaactatacagagaaaaataacatttacataaaaacatacaagggcacagttttactcaaagaagcaaaccgtactgaagccaaaaatacttctgcagttctgtagtttgagctctggattttctgcagaacctcatattacaactcaacaatagctacattcaattttctgtggcacagaaggggctacgttttctacttctgggattgagccagcatttttggttaagaaacaaataatgccaggcacagtggctcatgcctatattgccagcactttgggaggctgaggtgggcggatcacttgaggtcaggagtttgagaccagtctggccaacatggtgaagccccgtttctactaaaaatacaaaaattagccaggcatggtggcacgtgcctgggatcccagctcgtagggaggctgaggcaggggaatagcttgaacctgggaggtggaggttgcagtgagctgagactgtgccactgcactccagcctgggtgacaggctgagactgtctcagagaaaaaaaaaaaaaagaaacaacaaccaacacccagggtgacttttcaggaccatctgtttgtcctattatcagccacattttctcaaggaacttggtggttccctgcttctcatgatagtaatggaaactgcttgtgctggtgtcccaggtcccacctttcctatctgatgtcaacagagccactttgcttccagccaggctaaatgccttcgtttcccagtctcgaccacatttctgcctccaatcagtctttgtaggctgtcctgggacacagcaccaccttgaagcttttgctcctgctgttccttctccctgttgtctccttccttcttctttttgtcaatcccaatttccccctctctctcctggttcccttatcaagactctcatttccagtggctctcatctgagtgatcttcccactgtgaattcccatggcacacccattgcctgctttattacattttgccttggacttatgacatggctgttttacgttatacacaggatgcctacatacctgattcgactatcagtgtatagacaggggagcccatcctcttccttctccttagtatgaggatagtaggcatttgggctaacaaatagatgggggagacagggatccacaaaatgtttaaagcacactatctctcttaaaatatgtggatgaaatattggcattcagatgtttaataaacatttgattatgatgttagggcaaccggaaggctagcagacagaaatgcaagaagcagcctcagagaaggtgacatttggctggtttagggctcaggcaagtctgcaaatgactctataactcaaaagcagctctcccccttcctccaggcctcccagcagctccctggcctctctcccagacacagggctggattggcactcattccacaaacccgtcctggaaccagactttggaacaacagttctcaggaggaaatgcaagaccttccctttgttctgtttctattggtgttttggggggtttcgcattaaaatcttatcacccatcaaatctggtactgctgatgaaaaacacttttctgcaccttcatgttaagtgcttactgaccaagcaagaaaacacacaaagggaattttccgacatagaagctggtccccggcagcatgtgggagctgttccaggtctagacatcatttcttccctcatcccaattgctaaagatgcaccgagcaagcattcattacaaacaatgatttaatgtatcaactggccatgagagaaaggacaaagcaaagacacaaatctgtggcctttccatttaaatcagcaaaacattaagggcacacagctgcgccacatcccgagtttagcgaatccactgcagcctggcaggttgtcatctggacaaatgtcttgatgtgctccagagtctggccttctggcagagcctcatatttctttcagactcaggagctggaggcaccgttttgtctttgctacctgtgtatctgattccgtacagatgcgaggctaggccctgagaggctccagttcccggctggcatgttacgcctccagcagagctgtagatcctcactgcgtgggccaccgtggcagaccctactggttgccaacctcaccaactaccacccactcccacctctctctgtcttttccttgctaacagaaccacacttttattctgatatctgacacagagcagtaatcaagtgggtctcctcccagaaccttgggatgaatcatggctggttcctcctgcgtcactgcaaccccttccttctctgctgcgaattgatccggcgggggcatgtgacccatttctggtagatataaggggaagtctgctggggttttcataggaagattttctttcctaacataaggcaacatcttggaagaagaccccttttctgtttgtccctttccaacctgagtagcacaccactgggtgaggatgtaatatcggagcagcagctgacgtacagggaccatgcgtgaaaagtagagggaattgcagagattgtccctcggctccatgacatcgtggagaagctgaaccaagcttgggagcacctgcctctacacgccctgctacgtgagatgattaaatgaccttagcgcttgtgccagatgagttgaatgttccacttctggcagtcaaaggcattcttaatcgtccctattttctgtactaaacaagaggcaaagtctcaggctgatggtgagccacaggtaagcattatccccaggaaaggaagtgaacttggccttcgttcatgacatggataggagggaagagggattcactcgatcttgatgcgggaccaggatggatttcacttacacagtctagagacagagctgatcctgcaggactcaggctggcaccagagtaaaccaccatggggtcccatgttctaggcccctgcatttggctctgcaatggcagcaccaggcattccctcctcaagtgctcgtacgcaaacaataaacaagcctccaggggatgcctcctgtgaggtgggaaactaaggtcccacctcagtgtcaatgaccttctgaactgtcagtgtgcactcattcaaggaaatggaaagaaagtgcccttcttactaatcagcaatcatggtgacctgaaatgcttcctctttccttcaacacacacacacgctcagttctggtgccatatggtcacacaacagtaacacttagaaccaacaggggagaataccaacaagggctggcccctgacacgctgctaagacagtttccagagtaggtgaaccgagctaaccctggacatcagaggctccgtttttagatggacaaggccagagggtcagctcctgagtgcacttacagaaacactatttctcacgcgtgctcgcttcaaagcgggccataaatactcgggattatccattttttccccttttttctttttagtagtatgtggaagtacttgggattataataagctgggagcccattcctttccttttgtaatgttcaagggtatttctaaggcaatcattcaaactcatggtaagcctttttgtaaaacactgcgcaggcagccttgccttaggaaggatcatgcctctggtatgatcacctaagtgtctgcaaagcacaggcgaagaacgcatggcaaggaacggaaggaggcctaccgccagaggtctggggtggtgcgtggagaactgacagtctagcttctcggattcgtcggctccgtccatctccccttcatcactggacagtcggctggcgaggtcacctccaaccggtgggagtgggggctctggagtgtggccgctatgatttgaagatgtgctgctgcttatgctatttgcagatgatggtctaagggcaagagcggagaacaaacaaaataaaccaaatgaaccttttctgaggtaacaagatccacccagtttaatggtgctcagaaaacagcctgattaaggccaggttcggtggctcacgcctgtaatcccggcactttgggaggccaaggcgggcagatgacgaggtcaggagatcgagaccatcctggccaacatggtgaaaccccgtctctactaaaatacaaaaaattagctgggcatggtggcgcgtgcctgtagtcccagctactcaggaggctgaggcaggggaattgcttgaacccgggaggtggaggttgcagtgagccgagatcatgccactgcactccagcctgggcgacagagcaagactctgtctcaaaaaaaaaaaaaaaaacagcctgattagccttgccagtacctcagggagggcacattggtggtgactttgcataagggaaaacaatcaaggctgaagggtttgcagtgaccagctctctccagtgacacagtcaagttaggttctgccccacttgttgtccctggcgcagatgacaggaatgatgggaaagcccaacagtgtaagtggaacatgagatatgggaacgtgacaaagtgaactgaacctacaccagtcttctatgaattcagttacaactattcacccatttgcaggtaagtaagttgtacttgccatacagttgctttcctttgaaagtggaacctgacaggaagatcaaccaggtaaacaagatcagggcaatcaccaaaaatatcagtaatgaagaaatgcagtcctatgcatacgttctttgatacaaagctatgattttaggaaactgttatactggcatgaaaaaaagttttgtcctggtgatgggccactcattagtaccttactcggcacccatgcctgttacttaatattaagttgtagtttaattgtattttctgaggatgagtgtttcaatttacatttatttatttatttgtttgtttacgaaacactctcactctgtcgcccaggctggagtacagtggtgtgatctcggctcactgcaacctctgcctcccaggttgaagcaattctcctgcctcagcctcccgagtagctgggattacaggcgcacaccaccatgcctggctaatttttgtatttttagtggagacagggtttcaccatgttggccaggctggtcttgaactcctgacctcaggtgatctgcccacctcagcctcccaaagtgctgggattacaggtgtgagccaccgtgcccagcttcaatttactttttgacaagcccttttacgcactgtggggcatgattggctcatagtaggtgctaaagagatatttttttcaatgaaccaatgaatgaattctatgtgtgtataaaacaacccaacacatgtcatcttaattatggttaagcttataaaaaagcaatgtcacaataagaggtagaactacctgcttcctaggcagtaaaaaacaaaacaacacaaggcaaaaccaaaatcaaacacatccgcattagcagaagagttagatgaggaatagtcacagttaactgttactagcttttactacttctccactttcatcaggtgattgagcagggagaggtgacaaagatagggagaaaaagaagttttagagaaaaaaattgtttttctgctttctgctttgaaagctgctccttcaagtctcatgaagcagcactgctgatctgtctcccttttctcttattttcaccctggatactttgttgctttgaaatcttttcaggtctcaaatacttgaacttaaaacagagtccaaaagtatagtcacttaaaaacaaaaccacaaacgtgaaaacaacccaactgtccatcaacagatgacaagataaaatatggtatatccattcagtggaatattatgcaagccttaaaaatgaatgaaattctgctactatatgaatgacacttgaaagcatcacactaaatgaaataagccagacacaaaggacaaatattggatgattccacttacatgagatacctagacagaaagtagaacaagagttatcaggagttggaaggagcggggaatagggagggggtatttagtggatatacagttctggagatggatgacagtatgactacacaacattgtgaatgtatttaatgccactaaactagacacttaaaaatagtaaattttgtgttatgtatattttactataaaaacaaaacaaggccacatgtagtttttcagtgtcataagaattatgttgggatgacaatttatagtggactatcaccttcctgtactataaaaacaaagctgccattcattctgcgtgtctacaggccaaagaacgcatctctcccgacgttcctcaatacctgttcttctgtatcaggaagagcaacaacactattgtctgcttaccgctgaagacccaaataataaaacaatttagatgaggctgaaacataaaaaaaagaaaaaaaaccagtatccataactctgccacccaagatcaagtgttattagcatttttatttacatccttccagacgttgttactgggcacacacatgcaaatgcattttaaagcaagaactggatcacacgatcacccggaacatgaaatgtgggtagtacatactattttgagagatgctttttaaaaaacctagtgatgttgtggacgtgtttccatatatagaactatatcattttaaatattccccagtaatccatagtatgaatatatcacaatttacttaacaaatcttctgttgatgaagatttgtttccaaactttctaacaggctctctctctatgaagccctctccatcatgataggacctccttatcctgcaggagatagattaaaaaggagctggattttactaagtgtgataacagcatcatggttatatagaaaattgcctttctttttctgtatttatttttaatttttagagataggatcttgctctgtcacccaggctggagtgcagtggcatgatcatggctcactgcagccacaaactccagggctcaggggatccacccacctcaaccttgtgagtagctgggcttataggcatgtgtcacagtatctggctaattttaaaattttttatagagacagggtcttgcttatgttgcccagactggtctcaaacttgtggcctcaaatgatgctacttgctcggcctcccaaactgttgggattgcaggtgtgagccactgtgctaggcctttttttttttttttagaaagagtcttgctctgttgcccaggctggagtgcagtggtgcgacctcggctcactgcaacctccacctcccaggtttgagcaattctcctgccttagcatcccgagtagctgggactacaggtgtgcgccaacatgcccagctaatttttgtattttaagtagagacggggtttcaccatgttggccaggctggtctcgaactcctgaccttaggtgatctgccctcctccaccttccaaagtggtgggattacaggcatgagccaccacgcccggtcctgtctttagtttttttttttttttttttttgagatggagtcttgctctgtcacccaggctggagtgcagtggcacaatcttggctcactgcaacgtctgccacccgggttcaagcgattctcctgcctcagcctcctgagtagctgggattacaggtgtgtgccaccatgcccggctaatttttgtatttttagtagagacggggtttcagcatcttggccaggctggtcttgaactcttgacctcgtgatccacccgtctcggcctcccaaagtgttgggattacaggtgtgagccactgtgcccggcctgtctttacttttaaaagatgcatttggaaggcgtctgaggtgaaatgccatggtacttgcaatttacatcaaaacatatcatcaaaaaatgtagatgaagcaaatataattgcaaaatattaataagtaactgttaaagcaagacctgtaggtgttcaatatactattctctctacttttctatacatgggaaaaatttcataatgaaaaataggaaaaacaaaaacaagaagaaaatagagttagtagtacaggtatatgtaagaaagttattaaagaacttcctattttttggtattttatttttcttcggttttactgaggtataacatcttacacttataatacataaataaaattgtgtggccgggcgcagtggctcacgtttgtaatcccagcactttgggaggccgaggcagttggatcacgaggtcaggagatcgagaccatcctggctaacacagtgaaaccccgtctctactaaaaatacaaaaaaaaaattagccgggcatggtggcgggcacctgtagtcccagctactcgggaggctgaggcaggagaatggcgtgaacccgggaggcagagtttgcagtgagccgagatcgcgccactgtactccagccggggccacagagcgagactccatctcaaataaataaataaataaataaataaataaataaataaataaataaaattgtgtatatttaaggtatacaatgtgatttggtatatgtgtacactgtaaaatgattaccacaagttagctaacatatgtcacctcacagttaccgggttttttttttttcccatggtgagaacactttttatttttattttttagagacacggtctctctctgcctcccaagctggagtgcagtggagcaatcactcactgtattcacaggaactcctgggcccacaggatcttcccagctcagcctccctagtagctgggactacaggcatgagccactgagcccagtgaaatttgcttaagatctacttatttagcaaatttcaagtacataatacagtattattaactagagtcaccatgctggagattagatcccttgaatgtattcatcttgtaactgaaagttgtctagtatctccccatttctcccaacccttagcctcaaacaactggcactctactctctctgtgaatttggcttttttagattccacctgtaactgaaatcatacagtagttgtcattctctgtctgatttcacttagcataatgctctcaagttcatccatgttgttgaagatggcaggatgtccttcttcttttattgttaaataatatatataattatatattattttttatatatatgtattattattattattgttacttatttattttttttttggagatggagtctccctctgtcacccaggctggagtgcagtggcgtgatcttggctcagtgcaacctccgccttctgggttcaagtgattctcctgcctcagcctcctgcgtagctgggactacaggcacctgccaccacgcccggctaatttttttgtatttttagtagagatgggattaagccatgttaaccaggctggtctcaaactcctgatctcaagtgaaccacccacctcagcctcccaaagtgctgggattacaggtgtaggcctccgtgcccggtcttattattatttttttttgagacacagtctcactccttcacccaggctggagtacagtggtgtagtcttggctcactgcaacctccacctcctgggttcaagtgattctcctgcctcagcctcccaagtagctgggattacaggcatgcaccaccacacctggctaatttttttatttttagtagagagggggtttcaccatgttggccaggctagtcttgaactcttgacttcaagtgatccgcccacctcagcctcccaaagttctgggattacaggtgtgagccactgcaccaggctgaaatattatatatatatatctgcattcatccctcaatgaacacttaggttgtttccatatcttggccataatgctgccatgagcatggaaatgtgaagaacttcctgttaaacagggcagatggatcacacatatttctctcttctctcttccaaaatcttactaaaataacagtaaagagataaaaaaggcattagctttaaagaacaatgagatcagcagaaatgtggtgatacttacgacgatgacttcctaacatccatttaactcctaaaccaataataggaatctctcattttgcttgctaatgattggtttagaaaaggacatgagaaattttttaaaaaatattttttggcgtagagggcttttggaatgcttttcctcacttttaaaaagaggcatccagtctgggcaacatggtgaagccccatctctacaaaaaatacagaaattagccaggcatggtgacaggcacctatagtcccagctactcgggaggctaaggtgggaggattgcttgagcctgggaagcagaggttgcactgagatcatgccactgcactctagcctgggggacagagtgagaccctgtctcaaaaaataaataaataaataaataaataaataaaagagacacaaggctctggtgggggatgttgatagtggcggagggaggctatgcatgtgtgggcaggaggtatataggaaacgtgtaccttctgctcaattttgctgggaaactaaaactcctctaaacatgaagttcattaagaaaaacaaaaacaaaaacaaaagagacacacaggaaaggtggtcttcagcttcatctggaccttgttatatctgcatgtgcctggaattgctacagtcattttgctataggactttgaggatgaagccaaaagactgaagagggtggaataaaagaagggctgtgaaggcgagtcaatctctgatggttgggggctggtgctcctccacctctggacctcatgtagcatgcggtagtttcctaattatttaaatgtatggtaatgtatgttttctgctacttgctcctgaagcatcctaactgatacaagcatatgagattttaacattaagaaaacaggatgtggctggagaagtattaactaacgggaaaggaactgacctactatagaacctccaagaagctggccacctctaggacattcctagagctgcaaaagtcataggtgaggtgaggactaaatacagctcaagagttaaaggtcttaatacatggcaagtggacctaaaggtcatgtctaccaccttacacaaccagatgatgagttatcaccatttctgccaggacaccctcttctgtaccccagtaaactttctggagtctcgctttgttgcccaggctagagtgcagcggtgccatctcggctcattgcaatctttgcctcctgggttcaagcaattctcctgcctcagcctactgagtagctgggatcacaggtgtgtgccaccacacccagctaatttttgtatttttagtagaagcagggtttcaccatgttggccaggctggtctcgaattcctggcctcaagtgatctgcctccctgggccttccaaagtgctaggattacaggcatgagccattgcacctggccaatgacaataaacttgctaacaagagagcaaaggtttacttgccagagaagttgaactggagagattctagacacggggccatcaggctcagcgcagagtaggagtgaggcacagggctggacacagtggaactgcgggccatttctagtcagggcttccagattgcctattgccaggcacatcaccaatcaggtttctatctttgagaaactgaatggccccagagaaggcttccagatcttgcctttgggaatcctcaaacaaaaggctgagtggtgatcagacaaattttggtcgacaacctcacacacagacttccaattaggctgttagagcctctcttccaaatgtgcatggttagggatggcccaacactgctggagcatccccagtgtgagactgcccaaccaaacatcaaagacatgaacagaggaaggaaacaaacctggaaaaaactaagacgatgatggaaagagaaaaaactaaaaaacttatcttcaaagatattaggatgttattacctctgaaaaacgatagtatcttgtggtaaacaaccagataaagagaaccagatcctaaaaaataggaaagcatcataaatgatttaaaataccatttttgaagatacagtcaaagaaaatatttcagaaagtagaacaaggagagtaagagacaaaaagaggtaagagagctaaaggtccaacatccaattaataaaaagtcaagaaagaaagaataaagacaatagtggggagaaaattatccaagatgtaacacaggaaaacatcccagaagaggataagtatctccagattgaatgagctactgagtacccagtatgatgaatgaaaatgagctacatcaagagtgatcagctgagtgcagtggttcacatctgtaatcccagcactttgggaggctgagggcaggttgcttgagcccagatgttcaagatcagcctgggcaacacagcaagaccctgcctctgtaaaaaaataaaaaaattagccaggggcagtggcttgcacctgtagtcccaggtacttgggagactgaggtgggaggatcatttgaacccaggagtttgaagctgagataagctatgattgtaccactgcactccagcctgggttacagaatgtaatcttgtctttaaaaaaaaaaaaaaaaaaaaaaaaaaagaagaagagtgactattgtgtgaactttcagagtccccagtcttcagagaaaaaaaactggacgtgtgcaaagaaatgataatcagaaaaatattaaacttcttgataaaattttcaatgttacaagtcaatgaaaaaatgtcttcaaaattctgtagggaaatgattttcaatccagttatatactcaaatagattatcaatttaagtgtgagagtagaataaaaatattttcaagtgtgcaaggattctaaatattgacctcccacaaatcttttcacaggaagctaatgaaagaggtacttcatcaaaatttaaaggcacaaactaagaaggaggcagtcacttggatccaggaaacaggcgcttgaacacagaaagagcaaagacatgttccaggatgacaggaactgttttcattctaattatttaagcacagtttaatttttgaactatgtgcctatcttactctgatttttaaaaatgcaggctgggtgcggtggctcacgcctgtaatcctagcactttgggaggctgaggtgggtggatcacctgaggtcaggagtttgagaccagcctggccaacacggtgaaacccccatctctactaaaaatacaaaaattagccagcctatggtggtgggcgcttgtaatcccagctactcgggaggctgaggcaggaaaatcgcttgaatccgtgaggtggaggttgccatgagccgagatcaagacactgctctccagcctgggtgacaggggggagactctgtctcaaaacaacaataacaacaaaaaaagcagtgtaattaagaagaaaagtggctgaaacactctataataagttccagttgccagataaaagagaggaggagatgagtggaagattcctggggagtatgctgagtgtggaagctgtgctctagcccacaaaactggctgtgggagcaaagggagaaacagggacacatgacggtgtgctcgtgtgtgcacacacaccaggaggagggagttccgcatcatttcctttttgggctcatttccctcagggtgcatgcagcctcctggaggtgatatagtggtggatgctttcaggaccttttagctctgattgctgcactccagggtgatacctggtgggaaggagttcactggaaccagcttgggtctcggaaaagctgaggagtgatagggaatggggcaatgagccacaggaaggtgttgacacagtcacgcaagtttgtttagttgccgttcactgtttccccctccgtactacatcacccgtcccctgtctgcccgccagtctggtctaacgtcaaagcataggatgatgggtcttgtccagttcaactcagggaaatgcagagaaaatcccaccttaccactttgaggaagcagagcatcagtttgtctgagcgcattagggaagagagcagaaggcaattgaccttgattcagtccttaccatttgaccttaattcagtccttactatgtgccaggcatgaaagtacatttcttattccagccaccttaggtgagtaaactagtatctgcctttcttagatgagaatttttttttcccttttggtggaaaatggggtctcgctatgttgccaaggctgctgttgaattcctgggctcaagctactttcccacttctgccttcctaaatattgggattacatacgtgagccactgcgcctggcctcagatgaaaaaaactattataaagctaataagaaatggaggggttttgtgcctgtctgtacaacctcaaagccccccagactgagaaacagatgtagaaacagcacagggacaaatatataagaaatcagggagagaataaggcggggtgcagcagctcatgcctgtaatcccagcatttggagaggccaaggcaagaggattgcttgagcccaggagttcaagaccagcctgggcaacatagtgagactctgtctctacaggaaaaaaaaaaaaagagaattggcttgcagtgtggcaatatcactatcctaatgacatacagaacggaacagaagttgcttttaccccagactcatccctgccctttgtcaggaatctaagaccttctgcctgtctccacactgccctcgtcagtctaagattagctaagtttgcccttttatactttagactgcatgtgtaagcatctatgagacagaggggactgtgcccagattttgtggcaccagcttcctgcgggctctcagcctggcttgtcagatcccagccctctttgccctttccaacagtcctggtgggtttggctgggctagtcatccacaaccctcgggctttttggagcaagcaatgtgttcctttagagttggaggcgaataaactgaacatatgagtgtgttattccaggcccctcgggctgggggcagaagcacggagggcaggcatatggaaaccaggcagtgtcaaggccggcattcactgcctttgccttcctgtggagtgcccctcccactcactaacagctaccatccatggactgcttcttatgtgcttggtactttctcacttcactctgattagctctgttgtacagatgagcaatctgaggtgagacaggctaagaaccatgaccaagcttacctagttggtaggcacggagttgagatttccacttcaaatcccattccaacccttgttatctaactttaacttttctaattctagactcaagttccttttttagcaatccctgacaagaatgggttgcaatgtaagaatatgagaactaaaatattttcaaggttaacgaaaagatacgtatgaaataaattcacacacgttagcatttcccacaaagggaattcacaagtgggaggggatgacaataaattccattcatgtgcgatagtttttttttttttttgccaagtacagataatctgtgtagatgaaacatctattatatatacatcaatatgagtaaagcaacgtttttgtaagttttgtgtgattacaatattcaactctgatcatgcctattcaatctttaattgcaggggatcttgtcctaaactaagtgcaggacattttcctgattaactttggaaaagagctcacccctgagttttctggtgcctatctcaatcttgaaaagcatcctcaaagatgactctgtgggccgggtatggtggctcatgcctgtaatgtcagcactttgggaggccgaggtgggcgaatcacctgaggttaggagtttgagaccaacttggccaacatggtgaaaccccatctgtactaaaaatacaaaaattagccaggcatggcggcacacgcctgtaatcccagctacttgggaggctgaggcaggagaattggtggaacccgggaggcggaggttgcagtgagccgagatcgcgccattgcactccagcctgggccacggaatgaaactctgtctcaaaaaaaaaaaaaaaaaagattctgttaccaacctgtgtaatgtgttcctctgccccccccacccccacttcttttccagaaacattcttttctctgattaacctcacccatcctttcctgcttccttaacagaacacaaacagctggcatttctctatagatgaacattcccctgaaaattaaacccaaaaggaacagtcggagcagatccttcaggctccactgttttattctttaatggctgctcccttctttctctgttaggccaggtaccactgcttggtgagaagtgcctccatcagtcaaaaatagatggagatttgtatagtcaaagaaggctttcaaactgggttccctggagtccttggggaacccaaggatatccttgagagggtgtgggggacaatggctctgggtacatgtgtgagcttagccggcttcaggtggaggcaagtctactttcctatcaggtacccataataaggttgtgctggaatgaaaatgttcgatagctacaaagaagtttaaaagtcgctgtatatacaattgaagccccttccagaagtttggaacggaattgttgcctcaactctaaaacaagggtaatatccctaaccaacaccccacatgacagtgagaagtcattataaaatgatcttgcaaagtgaggggtggccaggaaagtagcatgtcaacggtgacagtaacgccacgatggtgagcatgatggaagtgttggggatggcaattccatctgaccgcgtcctcctgaatgcctgaggctgagctcggccataatgacagagggactctggctgtcaaactaggtcaggcttgcaccaacatggaaggcatcagggtgagagcctggcagatcaggagccactgctatcaaatatttgtttttgctttaaaaatcaactccctccccttcttttacgactatgtcctcttaaagcctatttgctacccgttgagattcacactgtatgcataaaaaacatcagataataccgttatctgcacttctcactgagtattattaatgtttcctttttataaaaattatggatacttgtacctcattcttttaaactctaaattcctgaaaagcggggtctagcttcattaatctctgtacccctgcctgagagtacctaacatggaatcttgcttatggagcgagcactcaataaatatttttgaataagtggttctctgtcgcattatttgggaattgagcttctgcccatcaaaatggacatgcatggattttaaattacttttaatccaaatgagtgttaattctgttttctattttttcatttctgtccaggacaaccacatagaaccccaaacaggtggcccagaagagtagctttcctggtgtggagagacatgtaaggacaaacaacctctgctatgccaatttcccctttcatcctgatgataggagagcgtgcaaaacaaatatcgtggcaactggactagcatggtgcagtgagcgtctaagaggtgctaacgacctattcacctgggtttccctactccgctccaggaatcgtcaactaatataaaagcccaggcagccaggaagtcacctggcggctgatgtgtcacagtttcaggtatttatttccagcttactcttgctgtgtaaaaacacacactgtctgatataagatctgcttgtctgccatgaagtccgctgctgctgacaatgatgatgacagtgatgataataatgatgacagcagtaaaatctgttgaacactatgtggcaagcactgggctgggcctcttatgtacattatctcatttaaactttactacttgccttaggaagtagtactattatgatttccatttaacatataatcagaccacatgccacagacccagcaagctagtcacttgaccaagcattcagggcttctatcgtcaaggtggtacttacctaggaagtacagagttgggtggtctggattttgcaggggatgcaacttttggttctggcccagagctccctgaagaccctagcagagaatcctgtgccggcccggattggcttggaagtatttccctcgtggaagtcaggagatgctctttatctttaacttctttttcccgggactttgctttgtgttctgccaggaggaggtcaaattgctttttccggcctgggactgccctccgatggcttagcgaatgtgtctaaggagaagagaaatgaaaagcacagcctctttgatcagcacataaacctgcttccccaggccctccatttcagaaatagcaattcatggaaatttagaggtgcttgaaaagtcaacttcaaggcaacagctcctgttctgtggctaggaagaggcagagaccacacgaacgcaaccatgccctacactcctggtgttaagaagccaaagcttcctccaaaaaatggcataggatgacgagcttcagcgcagaacccatgaaaacctctctgatgaaaggcaactgcgagggaatgctagagttaatccaggtgcaggtgggaggctcgattcggcccagacaaacagagccaccaagcagagagggccatcgccttgatcccaagaagcactagcagttcagcatgaaatacagggctttgggcgacccaatggcggccgccttgggtcagctgttcccctggccaccccggtgtggctggatcaggggcgcggcatatcatcctcccctccagggctgcctttcagggcgctgccgccgccgccgccgccgctgccgctgctcctgcatacattaaaacgtagcaggctttagaaccgcctgtgagtgcctataaatacaatttactgtctggcctcacaagtaacaggggaagcctagtttttttttttttttttttctccttcttaaaaagccagccagcttgaggcaggcactctgctaccatggacgagaagaaagcatttcccttacaaagaacagctgggggtcatgtcgaggttccacaccctgccgtgtgcagagagtggcatgcaaacatttcgacaaaggccccagcgagagcaggaagtattttttatggaaagagaaataccttgcaggtgagggatcttgtgcaaggtttctttgtctcgggatccaatactccacagtgtttatttgggtcaaattctctctctggtttaagaaacaaacaaaaaatataagaaaaaaggagactaaataggatttggcattaagactacattttttaaaaaatgcacatttgcaccaacaagtgagacattgtcaggcaatctgttttttgtttttttgtgttttgttttctcaaccagctgctaaaagtcttccagaaccgctcggggaaaatggtgctcccctctgaacccagagttcccaagtctagcttcggcagcaccgccgaacgcagcacaaggctcggggaatagggcgggagcaggcaccgaagggaaggagaggagccgtgctgctcttaatgctcttaacgctttattttacttgcaatggttccacaggtccttggcatttgggcatagctggctgcagaccagggagagccacctgagacccaacgacccctttcctgggctgctccaagagtacagacaccctgactccagctcctgccttcctgctagttttagccatgtaaatgggagattactccttgacatgtcagagtgacctgcctctctcatgcttgacaaagctctcggcgcaggctttgcacacagccttgctgaccacaaacaccatttacctgattgaggggcactctagcagtgttacaggcaggggcaggggagaaggctgaacttgaaggtgcagagagggcaggggcctgctaatctcacagctgctccccgcccccactgccctgggtctgatgcttcacgtgggaataaaacggggcaggctgccccaccaggatgaaggatgtctgtgcggagaggccaggcttccccagctcctgccttccagttgactgtggacagcttgtgcggaggttacttctaaggagcctgctctttctatacccatcttgggtccttcacccctgccaggaagacaatcatgctgtcctcaccttaaaaatgaggggatgtgaggtgatctctttttttcatttttattttttgagacagggtctcgctccgttacccaggctgaagtgcagtggtgggatcacaaggctcactgcagcctcgacctcctgggctcaagcctcaacctcctgagtagctggaactagaggcatgcaccaccacacctgcctgattttgttattttttgtagatacagggtctcactatattgcccagggtaggtgatctcttaaggatcttttgggctttaaaattccacctcttggatggcctgtgccgtttctggaaggcaccgagcaaacacataagtcctgcagagcaggaatgacacagccctctgggcatgtgggtagactggcagcagtgttgctggtggtagagggtgtacagaaattggtggtatctccttaagacccttgaatggctgcaaactcaaaaaaggttcctagctggaaaactgtctgaaattggtggagtaaactccgagcatataacaatgctcagattataccataataaatgaatgtattctattttcaaaagctttgagggtcatggggaggttgcaatggtgttactgatgatatgcacaagaaaactactctatacccaagacagattccctggctggttaccaaaatgcctcccccctttttttgctttttgtctgccttttctctctctctctctctctcttttttttttttttttttttttttttttttagcttcacttagaaaaaaaacctgctaggcctggagatgctggtttgctcggagccctctctggccaggctgcctggtgtggtgttttttttttgggtctgtcagagtcaggcctgtgcctggtcccacaccagcgcctcatgtcgacctggagctgagcaggctgttggctgagggtaggagctggctgccaaatgtgaaagtgaggcagaaacaagcaaaagacccgacgaaacaagacaacccacaaaatgcaaaaacaatgtgcggcaaaaaaatccccagacaacttcagatggggttacaggctggaagccacggccgtgcttctgctatggcgaggagccctcggcctccagccactgtgcccacgcctaccggttttctggggatgttgccaccacctctgaagagtgaaaccaagctttccatgcaggaagagccaggtgctgggggctcccgcccgaactgtgaggcccacagtgcttagggagagcaccaggctctacctttctttcttgacagtgggtgagcagcgcaggcagagatgtgcaaggtacaatgcctgctttatccgaatgctttgggcttgagggatttttcagacataattttaaaaagagttacagatgaaagatagagaaactagaactacagacaaatacagagtagacaataaaaattacccacaattccttgggtgcttaaaaatcaagcttaacccgaggacagtttctctgtcacagggtggctgtcactgtattttactttctctggccaccatcagggagtgcccatgatgtaagaagaagttatgaagtttatagcttctcctggtcttttggagaaagtaaaaactgccacgtttagttctacagcagatcgatccaaagcaaacattacccacataggggcctctaacaaataaccatcatcctgtgtgcctcttctggcaccccaagtgtctgctcagacaaccaaggagtagacccacaagagaccgccccagcaccctatcggcactgccagccctactgttcctgtttgggaattccaacctgattatgggggatcgacagttgtaaactcaactgcagaattaacctggaaactcccgaggccaaaggacagaggctgtgtgtccctgtgcagcacagctgttggcggggctgtccctcacatgccttgaggcaccatgagatccctgtgtgttgtccagcttcccagcagtgaagcttctatggaagccagggctagttcaacctgtttgtatgatacagatacacagaatcacctgctcacaagaccctcggaatctacagagtaggtcggtgcagagcaccctgcctcctgggttgctagggtaactcccgctaagcactgaactgagtgagggacttcatctgcccggggaagaagagacctggttttcccttgcatttttaggtggggttcctgtttgcaggtaaactctgcatcccccttaaaatgaaacagacctgcttaatgataacagcacatcactccttcgttatggctgcgactccctttcagtctaatcatgagtcagaccctgacgacactgacacatacctgaaagtctcctgtaaggcttgttgctgtttttggtgccattttggtgtttcttgtctatggtggttggcagaattcctttgccatttaagatcttctctggtgaaggtggcactgacttggacatcaggacaggcttaattaaaggaggggtggagacggcagaggacgaggtggaggaggcagaaactgcagtagtggttgtggagttcattttgacattggcaccatctgccttcactaggttaggaattttctctaaactgactacaggaactggaacactgaaaaataaatgaacaaacacacacaattgtcttctttgatacatctagtctgctgaggaaccatacccgcttatcattatcagaacatttccttatcacttatttatactccttctataagcaagcagcatgagtccagttttgatgggagagagttctgtgccctggaaaggatcaacagggggtgcgaggctggcacagtgtcaggggtggcatcagggctgactgattaccgcccgtgctgagctgtccccatagatcctgcaactccccacttcccgggccctataggttggccatttccaacacagcaccttgggcagaacaaggcgcctgttgtgaagctcaggaagagataccgtttgtcccctgaagacaatgtgccactgctgaatcacgccccctccccccgctgctcagctagtcccccagcccggcccggatcgggcctgacatctgcttagctccggagtgctgacaggatcacaccacaaggaggcatggcttcaggccagcgtgctgcacggcgtgctgtcggacggcttctggatcactctcacatcctggggatgggctcaaattgagtgagccgccatgtagcattatccaatattccattttaggcagctagttatgtaaataggcaattctcaaggctggcaggtgaaaggatgaattttaagaaggcagagcacaaaggtgtgcttcactcttcagaatctgtcaccttagcccccttccctgctatttctcctgtatgggatgtgcatttgatttctcttcttctttaatgctgaaggacctgcgtctggggggctgtggagaactccatctctgggtcttaaaagatgagatgaataagctttgctttggtccctgagctagattccctttcctcctggcaggagggaagaatgctaacatgggctccccagtcatctctgagctgagagtgaagcctacttagctatttgaatgccaaatgatctagaatatggcttttacattcctgcagacaatgtagggcaggaaagaggggctgtttttggcaggaaaagaatcttatctgtccacatggctggctggctggctctcctttctctaagattcattcacagattatttctttgatcaacttgttcatgaaattattttagccccctctcagcccctgccccttttatgactctgaaataggatcccagctgtttgttacagatctttgccagcgagaagggcacagagcagcggaacagattgtggctggacattaccgacttctcccttggaccacgtagcttcttggcctggggaagggtgacctggggcttcaagtcccatgtgaggggaaactagaatgacagttttttgtaacaaaccctgccactgccaattccgtccctgatcagagtgtctcaatgtctgagatagagctgaactgctgctcctttctatttaatggcaattctcaaagcactcccatatcactgaagaatggcacaagaaaccctttgagagtgagcacaccaagatgctagacaggtattacctggtgaaattagtgctgcattcctgatttttcccaaatgataaaaagatgcaaagcaatgtgatacagaattcttctaggcttattccttgacacatttaaaaagccacaagttaagaaatcagggtcctgaagagagatctgtacacccatgttcatagcagcgttattcacaatagccaaaggtggaggcagcccaagtgtccatcaatggatgaatggataagcaaaatgtagcatcattcagctttaaaaaggaaggaaattctgacacgggcaggagccttgaagacattatgttaagtgaaataagcctgtcacaaaagacaaatactgtataattccacttatatgaggtacctggagtagtcaaattcatagagacagaaagcagagcagtggttgccaggggatggggaagggagaatgggcagttttttttaatgcccgttgaacaactgtatagagtttcagttttgcaagatggaaaaaaaagttctggagattggttgcacaacagtgtgaatgtacttaatactactgaaatgtacattaaaaacggttaatatggtaaattttatgttatgcttattttaccacaattaaaaatgttttacatgtacaaactaaaaaaaaatgcaaattacaaaactcttacaacctaaattatacttcaataaacctgactttaaaaatacagatcagaggctgggctcagtggctcacacctgtaatcccagcactttgggaggctgaggcgggtggatcacctgaggtcaggagttcaagagcagcctggccaacatggtgaaaccccgtctctactaaaaatacagaaattggccacacgtggtggctcacgcctgtaatcccagcactttgggaggccgaggcaggtggatcaccaggtcaggagatcaagaccatcctggctaacatggtgaaaccctgtctctgctaaaaatccaaaaaaaaaaaaaaaaagaaaaattagccaggcgtggcagcgggcgcctgtagtcccagctactccagaggctgaggcaggagaatggcgtgaacccaggaggcagagcttacagtgagccgagatagtgccactgcactccagcctgggagacagagtgagacgccaccacaaacaaacaaacaaacaaacaaacaaacaaacaaacaaacagaaattagccaggggtggtggtgcatgcctgtaatcccagctactcaggaggctaaggtgggagaatcacttgaacccaggaggcagaggttgcagtgcactgagatcatgccactgtactcccacccgggcgacagagcgagtctctgtctcaaaaaaaaaaaaaaagtgtcagtggccagttgtggtggctcatgcctataatcctagctctttgggaggctgaggtgggaggattgcttgagcctaggagtttgagaccagcccgggcaacatagcgagaccattctctacaaaatagaaataaaaattagccaggcatggtggcatgtgcctgtagtcctagttacttgggaggctgcaggtggatcgcttgagctcaagagtttgaggttacagtgagctaggatcatgctattgcacagagcaagaccctgtctcaactcccccctgaccccactggcaccccccaaacccaaacatattggccaggtatggtggctcatgtctgtagtcctaggattttggggggccagggtgagaggattgcttgaggccaggtgtttttttgttttgttttgtttttgagacagtgtctctgtcacccaggttggagtgcagtggcacaatctcggctcactgcaacctcggcctcttgggttcaagtgattctcctgtctcagcctcccaagtaactgggattataggcacccgccaccacacttggctaatttttgtacttttagtagagatggggtttcaccatgttggccaggctggtctcaaactcgtgacctcaggtgatctgcctgcctcagcctctaaaagtgctgggattacaggcatgagccactgctcccagccgaggccaggtatttgagaccagcctggacaacaccgtgagaccatgtctctacaaaaaaaaaaaaaaaaattataaataagctgggcacgttggtggacacacacagtaccagctacatgagaggctgaggtaggagagtcacttgaacccaggagtttggggctgcagagagctaggattgtgccactgtactccagcttgggtgacacagtgagaccctgtcttggaaaaaaaaaaaattagaagaatctgttctgttcaaaaagatttattgatttaatttctcacccttgttctgatctgttgacttttatttctttagggaaaaaaatcaaacttcaagtgttgatatgaacacatggacagctagcaagaagagaaggtgctctagtacctgggcagccttctctgatgtattaatatttctttgtgaagccaagttagttcaggaaaggaaattagaacttgcaagttccagatctagttcttgttgcatgagctggtacgagttaacataacgcctctagtttctgtgaaaaatgccctatgtagatgttaggtcctcaggccttcagcagacaaagatatgatgcctgggatagaataatccagagcaattgtacaaatggaaatacatttaaaaaaccggctgggtacggtgactcacgccagtaatcccagcactttgggaggctgaggcgagtggatcacctgaggtcaggagttcaagaccagcctgaccaacatggtgataccccgtctctactaaaaatacaaaattagccgggcgcggtggcacatgcctgtaatcccagctatttgggaggctgaggcaggagaatcgcttatacctgggagacggaggttgcagtgagctgagatggcgccattgcactccagcttggcaacagagcgagactccgtctcaaaaacaaacaaacagcaaaaacaagccaagcagccctcaaatgctcatagcacagtctgcattactcctctaaagtcaacgtcaggctctgaatgtgctccttaaggcagccccacgagcacaggtgcaccaggtcccaacatttggaaccgtgccagttgactcatctctttggtgacacttcttcccaactgtgtgtaactgagcttgggccaggccagctaatgtctgtgactgtctcctaatttggaattttttctgctttataatgagtgtggcccaatcatactctactgtcaatgattccagaactcagctggatgcgaaattggagcccatcagaaacaggaaagacagcctcacgtgcagtcctctggattgaagaatgggaagcattggggaaaaaagtctgatcaagaatgtttcaaagatttcaaagaccaggtgagttggtaaggggctgggccactgagtgaacacctctgatgtgaggtaaaaggacttggcagaaggagagaagggagactgcgctcttttgggtgtgttctaagggtgttcattagctaatggagaagggcttagaagagtgaaggagaagaacctagagctgtccctgatacttttttctttggtgtcccttctctccctcaaaagctttgggctttctctctaagggaacctgccttggcctggactgagaagacacagaagcaggcagctgagtgatggtgggaaaggcatttgaccttgccatcctcttccccagtatacacgctagccatcgggccagcctttctttactacagctggcaacagccccaaagtcctgaactgagaaagcaaaggaggaaacggtcacaggatagtgccacagaatctggaaagccaatcccagagatgatgctttttgagcaaaaacattcagctgacataagagcctattaagagccccaccccccacctcccatacacacagatcccgcgtgtgcctatgctgcagccacagtgcagtcacagggaagccagtgtctcggaattgtcctctgcttcctctcactggccccgtgtgcatccccctcacttcctctgctgtcaccttccccagccaggaaagtgtcccagccttgggcacgccccttccagatggctgtggaccctgaatgacaggttggacttttttttccatttggaaagaatccaaaaggttctaacccctgctttcacagtatgggcatctcccatcttctttgtgtctaatcacagtaacgcaaacacctccatgtgcaggtggtgagacctgggagggggtggtgagttggcaatagcctgatgggtgactcagcaatttattacactgtttgcttaggtgacaaacaagcctggcagttacccccgagcttagccaaagcccttcaaagttcctttcccttcagtctaaaggatgcatgtgcacacttcccaaagtcgcacaattagttgcatttatcaactcacgattgtcctttctttgtggagcagtgtttgaaagggaaagatgagtctccactcttcccctgctgctttcataatgcctgttttgttcacttgggatgaactctttcagagagctcagggctgcagcctgttcccctgctgtgtctaatatgctgggagtagttctctcctcatcatctctgtacctctgtctcggtcctgggaaagaaacccaatgccgagaacaccctccctcatcccccttgctacgtgggggcgatatctacctctgtttcttttgtgctgctttagttgcccacgtcttcttcctttgtgcttggcctgtctgaatttatctttctagatcaaggcgggtcctctggctttaagaaacatggttctcttggcatcaagtagattcccctccctgcccagtgatgtctgcaaaagaacagaggtggagactcatgacggtgccattgcaagagccaccaatgtgccgcagggccagctgcccacctgccagctacgctttcctggtgatcatgatctatattctttgattatcaacagaaatgccttaagagaatggttctgaatgtctctaggtctgcagaaattattgccagcccttcttcacttaccagagcacggtaaagatgaatttgacaggcaggagcctgaagacatatggtatttgtgctgtgggttttgtgtgtgatgagagttctcagctgtctgatttcctccaccaattccttcgacaaaagcctatgtgcttatgctgctggcctggcagaattttgagaatctctgactcactggcagagccttagaagggccatatcacccagcctcttggcttccaagcagtgatagcattaagtcatccccaataaaaaggaatttaccctcttttaaaatgcccttggagaaggaattcaatttggctctcttggatgtattttggcagctactatgaggaaattatttatatccaatctaaattctttaagttgaagaagtacttgggagattctagaagtctgaggggcaggcaatcactaagaatcagggtaaataacagagacacaaagtcctactaccgtggtatgacagatacagttgatactgcataaatcctgacaagtgaataaatggtatttttgcggtgtgtctggaaaaatattgggaaaactttcagaaagcctgtctgtaaacacctttagcaaacagaaaacaggtattcaaccacagagcatggtaaataagaatatctgccagataaatctaacattattctgtggctgagtgtcaggcctggtggttagagaggaagcatagtgtctaatctctcctggcctttgcacagttttggattctctcccacataacacaccttcagtaaactggggaaatgtggtcagaccacacagttaccaggtgagtggtcctggcagcagagacaaaagaaaaatgggttagcagggctcaatttcagcctagagtgataccatgcagagctcgacagggacccactgccggccaagaaggtcatagtgtcttcatcagtgacttggatgatgggccaagactttgctcctcaattgggttaagagatgattagctgctgagaacaatgatgtgagatttcctcctgagtcagttaggtgggaggaaaaatgaacaagctgacttggaagaattgtaaaaatggccagaagcaaatcaaataaaatcagggagaacaagtatgactgaattgaaggtctgtgccttgtcaatattctggcaaatttatagaatgtggagtgttggaagatagtttataaggcttagataaggcttagaaatataggctttcaaatcagaccaacctagactcaaatcctgccttttctgttgctggatgcattacggtatcacagccttctggctacccggtttcagagcctcagtgagcttatcaggactctaagaatgagaaagaggacacctggcctggcaaggagtgagtgctggtttcagtcctgccttggtggggtggtctcatgcagtgcaaagcccacacaaacatatgtggctgccctgcctaacttatctcaggccttcctggctccatgcctcagtttccttatcagtcaaatgaagataataagagatatttgaagtgattaaatgaggtagtagataccaagtgcttagcatagtgccaggcacatagcagactctcaataaactctaactaaaccaaaagggcacagaggatcccagcatctgctctcatccaccgatacttgaaaggtatatatgtggggtgcaaatcatggtcaccatcagaaaacttctgcttccttagtcccttctggtcccaccgtggaaggaggggtggacagggtggaggcagaagcaccagcagagggtgggagcagcagccttccacattcatgcagagtagaggactccttctgggtgaggcagtgaggaagaaaagcagaacgaggtggggccagattcaatggcccttttccaggacctgtcagccctacttcacaagcccacctgcttctccatctctagtattctaggcactgcttaagcctggactagtggttaaaggtcccatctgtataggacattctggaagaggagtaaggaggaactccagcctcctcatgcacaaacatgttgtctcctgcaatcctgaagtatgttaggcattggggctctctgctggttctaagatgcctcccagagaaataactctataagcccccctctaggctgctccaattttctggaagcaggaggccccagcgcatgtctccctgctggtctgttagtctctcttgtacttctgttattcatggcttcccagggcatggagctcagaaggtggtctccaaacctgctgggagaataaggagtgctaagtgtcctgacattcctggggagtcctagtgccctaggactgtgaacaagtcagcaagtcagagaagaggagaagataaaaaaggaaaaatcgagccctcatgcagtagggcataggatgctgcacaggctgcctttgggaccagctgtgtctgcagcagtgtagccttgggcagggagtccaggagcgttttaaggataaccctagacctaatcaactgcacctgctcagtgcctttcctctgcaaatgagaacgaagagccacacaattccaatgaatggccattgaaattcacatcaataaggaaatggtatcagagcctgggagggcaggaattgagaacgtagagattaggaggcaatttgattctgcagggagcgctggtgcagggtgaggcagagccccaagcaccctgtccccagcactggcccagaacaggctccgctcaggagcaacaagcgggagcactcccctcggcagccaccagaggtcattggttcctgctgttcgagctgtaggctgctctgcagtgccttccagccagtacagcccagacagttactgtttcccaacagtcctggaggaaaccctgacccaaggggagacagggcaactccttacagaacaccctccatccccctgccaggaaggctgggagctggcaccttgagcagagaccctgggctcccatcctaagcctttggccttcaagaagctttttctgagcacgctgaaagatgaggaaatggcaaagcatcccaggctacttatcagtgctccagcttctggccaggtaccctgacacctgctgctcccagtttcctgccagaggaaaagccctcaggagcaccttccctcccccaggcatcactcactcactctgctttttccttttttgtattagaatccggttctgggcaggcagccttgcacctgaaccacctccatccagaaaacaaagcacattttctttttaaaccctcaagggtttattctgaatggcatttttgccatattaaaaaaaaaagtttatcttcacactgacctacagcaaactcaggatattctttgttccaaattaaatagactttttcttttttaatctctatgttagcaatatcaggccgggcatggtggctcatcccagcactttgggaggctgaggtgggtggatcacttgaggtcaggagttggagaccaggctgtccaacatcatgaaaccccgtctctactaaaaatacaaaaattagccaggcgtggtggtgtatgccggtaatcccagctacttgggaggctgaggcaggagaattgcttgaacccaggggatggaggctacagtgagccgagatcgtgtcacagcactccagcctagaagccagggagagactctgtctcaaacaaacaaaaacaacaacaaccaaaaaactctatgttaacaatatcagcatccagttagaaaccagctcttccctgaaattcagtcactcacaagtcagtctgaccaaagtccacctcttaaacagctgttaaaaggtccaggcctcagcatcgcttgcaacctttctggcttggcctctctgtgtgttctaatctgtttgcactcagccaccaacgcaaatctgaccatgaaagtctttgtgggctgcccaaggcccagaggtccaagtgtaaccttcacagcctggcccaccccacccctcctgccccagccaccttctcctgtagcctcgctggacttctcacttctccttgaacaccagtgctccggcctggctctgtgcctttctgtgggccgggctctcctgctggtgtgccctcccccattctccaggtgaacactcccccatctgtccagatccggaggaaacatcctcttctctcccagtgcctgctgttccttcctaggtgtttctgctgcactcatcatgtcctatggcaaggttttatttctacatctatgtgtcctgaccagactgtgagctgcctgatgatgggaaccctgtcccagtatacatgtcgctctggaattatcccagcagcctatacattatctagcatttaggaagggctcgataaatgtttgatgaatgaattaatgttctcagtggaagttaaatcacataacacaataaaaaccaaactggcaccccaccaatgcttggtaagaacaaatgctttaggtggggatcaggctgtgctgcctctcctcttctgagaagagattgtgcaatgacaaaggtgaagtgtccgctcatagcggcacatgctgcacacctaccatgcatgagcagtgagttatgcactcacgtgcaataccgtgtttaatctctatccccaatttcatagatgtggagcctgaggctgagaaaggcttgccccaggtcattccacaaaatgaagggcagagagagcttgacgtcaggcaacaccgagggtggtgctctttactgtagcactggaagccagaaggccaggggtcaagtctcagctcctctgctgtcccactgtgtatgtaatctcagcccatcgcttcatctctttgggctctgttttcttatcttcaccacaaaatagtctttaggctcaaataggattgggctatcaaaacatctaaaaatcataatgagctatgcagctatgaaggaccatggttactaatctctgtggctcatccctcttctttccttcaggccattttttttttttgagacggagtcttgctctgttgcccaggttggagtgcagtggcacaatctcagctcactgtaacctctgtctcccaggttcaggagattcttgtgcctcagcctcccaaatagctgggattacagggacacaccactacgcctggctaatttttttttttttttttgtatttttagtagagacagggtttcaccacattagtcttgaactcctcacctcaagcgatctgcccgcttcagtctcccaaagtgctgggattacaggcgtgagccacagtgactggacacttcaggccattttcttccttccccagctgtcttggtcttacttttcctcccaaagctggattccctatttctgagcacttctgtgacttcacaaggttggctgcatttacacccaaggagctgtccattgtccttacctttgctcatctgaaaacccagtgagcaggcagccttagatgtttaaattcccacggcctccctgtcctggaagggacactctgcccccagccgcagcccccacatgcttcaatattctggtctgtctaccttcccaccctctcttaccccttccctctgaagtccattacaaaaacattaaacttctactctgtaggcaaacaagtgggagccatcaaagagttgtgggcagaacgggctcacatcactctgggggggtgtgtggggtggacaggaggatgggcagagtgaggggcaaggaggccagggagaggcaactgcaagaatcctgctgaggaatgcagggcagtcacaggggtagggtccttgcagtgtctgcggctccttgggttgctcgtatttcacagcctgagacgactctctgtgtcttcagggagccatcaatcctgagccttggtcttgcccccagttcacgccagcaccaggcaggaagagataagccgcccagtttctcccacaggcatctggccagggcctctcagtgatcgcttccctctccataaagcgttgggaagacttccagagtgcttacactccctcagccccagttgctccgggaagacccgcctggtaattccaagcatttggagaggagccccgcctacctggggagagggagccctcccccacctgctgcagggcatgcacagggaggccagggagcctgctgatttttcttttgctttggctcattttcctcctggagcagcgggctcatcttctgcatttttaatagctgagcatatttagcattcaacacacacgtgtgggttgataaggcccaaagagaaggcaacaagccatccaggggaggaaatcctcctcctacctcctctctgcctcctgcccacctcagcctacaactgtgggtctgagttccccatcaattcgccaggccagaccagggttaccgaagtgatagcagctgagagagtcagactggctgactcggtcactgtgccagggtctggtcccatggctgagcagggactcataagtaaaggctgaaatgctcatcggagctcaaaagggccaaacagccataactccttcttgattcttatgtggggaccgagtcttcttgcccacctccctccactgtcatcaactacatagatgtcaacactgtgagatggtggccaggtaccccctgacctctggctcccacaggggtggtccccactgtcaggacagtgaaccagtggaaggggcctctgagaggctgagtacagggctggggatgctgggcagcctgtgggtgctgtcaggcagttctgcagggaacaaacctggtaacatggcaatgctctgttttcccctttcttcttcttccttttttttttttttgagatagtctcgctctgtcacccacactggagtgcagtggtgtgatcttggctcactgcaacctctgcctcccagattcaagcgattgtcttgcctcagcctcccaagtagctgggattacaggtgcccgccactacactcggctaatttttgtacttttagtagggacagggttttgccatgttggccaggatcgtcttgaactcctgacttcaggtggtccacccgcctcggcctcccgtgttggaattacaggcgtgagccaccacgccggcctccccctttcttgtaatgcagttatttttttaagctactcagtcacataaaggagaaaataacaaaaccacagaccatttaaccttgtgctggaatgccaggaggtcagcctgaactctagagtagtgtttttattgctgtacatgtgaatttgagctatttggaaagggtggccctaacctgctgttaaatctaatctaagggccacggtccagtatgggttggcactgcttatgctttcttggccagtagggggcgatacagagttcacttggagcaatggaacgaacttgggcagggagttctctgcaccgcctgatgcaggtcttccaggtctgtttccaccacagacccagcagcaccaggccaaggggagaaaggagttggaatttagcaactcctgatgggagcgtaacatttaaagagattagaggagcccaattgacacaccattgaattgaaaaaaccagagggtcccacccagggtcagtggcctatgtgtctagatccagcagccactaaccacttcaggctactaagcatttaaaatgtggctactgtgggggccaggcactgtggctcacacctgtaatcccagcacttcgggaggctgagttgggtggatcccttgagctcaggaattcgagatggtgaaactctaactctacaaaaacacaaaaattagccaggcacagtagtgtgtgcctgtcgtcccagctacctgggaggttgaggtgggaggatcacttgagcccaggaggttgaggctgcagtaagctgagattgcaccactgtactccagccgcagcctgggtgacagagtgagaccctgtctcaaaaaaaaaaaaaaaaaaaaaaaaaaaaagataagaaaaaaagtggctactgtggctgtggctgaacgggattttaaatttcatttaagctgagtttgttgaaatttaagaacggatacttgattcagttattagaaaatgtttaagtctgtttagaacaacttgggtgtcaatctattttataacctttagtttttatgaaacctaaaaatgggtcaaatatttctaatgaaaatttagtgtccaaattgagatgtgctgtaagtgtaataaaacacatgcaggattttgaagacttatgaaaagaaaataatgtaatctatctcattggttatatgttgaaatgatagtattttgaatatattaggttaaagaaaatagtcatgtgtcacttcatgatggggctatgttctaagaaatgcaatgagaggtcatttcgtcatgctaacattgtagagtgaactaacacaaacccctgcacactggcctgggcgacagagctataccccatctcaaaaaaaaaaaaaaagtgaccagttccacttttccaatggattaccctcttcttgccggtctgggcaggattctgtcctgtcaagtataaaaggtgcttgaacctaagctgtatggtatagccacttgttcctagattacaaacctgtacagcatgtgactgtactgaatactgtaggcaattgtaatataagtgtaagtatttgtgtgtctaaacatatctaaatatagaaaagctatagtaaaaatagggtataatcatcttatgggactgctgttgactaaaacgctgttatgtggcacataactttttttttttttttttttttgaggtggagtctcacttgctttgttgcccaggctggagtgcagtgccaggatcttggctcgccgcaacctctgcctcccaggttcaagcaagtctcctgcctcagcctcccgagtagctgagattacaggcatgcgccaccatgcctggttatttttttttgtatttttagtagatacggggttccaccatgttggctaggctggtctcgaactcttgacctcaaatgatccatccgcttcggcttcccaaagtgttgggattacaggcatgagccaccatgcctggccaatgactactattaaaaattaatttcatgactgggcatggtggctcacgcctgtaatcccagcattttgggaggccaaggcagacggatcatgaggagttcaagaccaggctggctaagatggtgaaaccccgtctctactgaaaacacaaaaattagctgggtatggtggtgggcacctgtaatcccagctactcaggaggatgagccaggagaatagcttgaacctgtgtgatagaggttgcagtgagctgagatcacgccactgtactccaatctgggtgacacagcaggactccgactcaaaaaaaaaattaatttcacctgtttcttttgtacttttttccaatgtggctgttgaaaatgtaaaattaacatgtgtgtcacacattacatttctattggatagtgctagtctaaacaattctagacaaaaggtcagccatctccaggaatggaaatctcagaatccctttcaatggtcacatccatttcattcaattcgacaaatatttactgacacgagtaccacgcttgttgagttggtgagaggtttccatacaggaggccctgcagtaactactgggcaggaggaagacaggaagtggagtctatggccgaccagagaaagtgtcacatgtgaggtaaaaattaagtgctccggggattaaaagaaaggcgatagcatatcaggttgttggcaaggaggaagtgaatgaggaaagggcattgagagaaggtagccagtgaaacgggcaataagaatggtaaggattatggccaggagagaaggggactgaatgctgtggagacaccgggcttagcagacccagtgccctcagactcctctttccctgtcccaatcctccatggcaccacccttggcctctgttcttcttcttctcacaccatatacctccctggcaggcccatctgtacccacagcttccatgcccacgtctacactgatgactctctagtcctggcccatacctatctcttgacccctggttccaaacattcaatgcccactcacatttcttttctctttctttttttttttgagacgtgtagatatttcttagatacttcaaaatccactgacttcccagctgaactcatccttcctttccctccctcaactctggcccttactgtccttcccttgaggaagcggcaggaccacaactctgctgtcgtaatgccttcccttgtactccagccctacatatgaccagccccaaagtcctgcggagttttccctccttaatatttatctcacccagcccctccgtacacaccactgcctggatccaggctgtcaccacgcctcgcctgggtgacacaacatcctcaccgttcttgctgcttcctgtgtgaccccccgagccatcattctacgtggctgtcaaggtgaccagactacatgagaaaactgctcctttaacaccgctttgaaatttccagggtgaagtccaaattcctgaacttaacacatacagcagaacttcataatctgggcctcactcccctacccagtttcacatcctgcctctccccacatgcaaatacttttgcacattctgttccctttgcctaggacacccttccaactctcttagatagaattttttttttttttggtggtaaaatagacataacattaaaaatttaccattctaattccattctctttgtctacctccttcctactacttgtccttctaatttagcggaagtgaccttttttttttttttttttttttttgagacagagtcttgctctgtcgcccaggctggagtgcagtggcgcaatgttggctcactgcaacctccgcctccagggttcaagcgattctcctgcctcatcctcccaagtagctgggattacaggtgcgcaccaccacacccagctaatttttgaatttttagtagagacagggtttcaccatgttggtcaggctggtcttgaactcctgacctcgtgatccacctgccttggcttcccaaagtgctgggattacaggtgtgagccaccatgcctggccagaagtgacctcttttgaaaaaccctttctgagtcctcagcctgggttaggtacccttctcctttgctaccaacctcatagtccttatcactttgtactgtgttagcttatgtttctatttacagactccctaagacaatgtctgtgtcttaactttgtatccccagggctgcagtgtacagttgtataggttatgcactgtgagaggatgcctggctaaggaaataagcagtggatgaaggccattagtcaactgtgcacctggtacaggcctgtatccagactgttttctaatttgcacaaaggtgcttgtgtgacaccagtgggccctgtgtatcccctgtgcttgttatagagttggcacacagtattacaataggtgctcattaaatgttgagtaaagatggacggatgttctaggcaaaggtaccaggggtagagatggggggaaatctggcctaatagggtggtattggatactcagtattgacttagggtggttgcagctagtttgtagagggtccgttatgttgggctgagggactaactctttaattcaggaggcagtgaggaactttgtgaatttttgataggactgtgatatagaatttcaaaatattcaggcttgaaaatgagactcagagaagtaaagtgactttttcaaggacacacagaaagttagaggcagggcccagacttgaatttgattttcttactcctagctcagtacaggtctggggaactgcactctggggagctgcactctgggatagctcagaactgaggctgagccctctaaggctcaaaaccaaatcatcccagccttggtgactctatctcttccctgacacatgttcctggacgtgttgggtaaatggatgacagccaggcagatgggaggtgaggacagttaggagaccgctgcagtccatggttcagcctcattcatggtgcaccactggttctgtcctcagaatatttaccgacttgcaggcatggcaaattgcccgtgcctttctcttcttcccacaggtgaacattcgagtcttttcactacgagctatctctctccttacaaatctcttggttgctcatctctggacctgggctagtttctttagattctttcttttctttctttctttctttccttccttccttccttccttccttccttccttccttccttccttccttccttctttcttttcttttcttttcttttcttttttttttttttaagccagagtcttgccctgttgcccagcctggagtgcaatggagcgatcttggctcactgcaacctccaactcccaggttcaagaaattctcctgcctcagcctcctgagtagctgggattacaggtgtgtgccaccacgcctggctaattttttgtatctttagtagagatgaggtttcaccatgttggccaggctggtcttgaactcctgaccttgtgatctgcccatctcggcctcccaaagtgctgggattacagatgtgagccactgcgcccagtcagattctttctgcccctttttgcccctagctgaaggggacttgactgtggcaggtcttaagaagtgtgtgttgagttggactggattgagtgtggacaatgatttgaaccaatggtctccctgaaggtttgccttttgggcgagtgctttttggtgccatggggctacatgagacctctcatttgctcttttacaaggagagttcattgatgatcttccccgagctccctgggtctcctcctggcttatgtgctccttccctggctttccttattttgtttctctgtagctcatttctagactctgaataaattatttgatcatttttatcttcactctgagtctgaagagccatttctctaattttttttagagagatttgacttgtcaatctttatcccaggatggaagtgctgtcctttggcacacatgataacatagtaataataaccatgacgttatgctaaattatttattgaacatatactatgatccagatactgtgcctgctgctttataaaaactagctcacttaatcctcacaacaatcccatggaatagagctattattggccccactttacagatgaggaaatggaagcacaataagatcaaataacttgcccaaggtcacccagctgaaatttgtgcccaggccagtgactccagagcttgtggttacatcgggacaccatgcagccccagtaaataaactctcaggcacattctcaggtcacagataagacggattgcaggttagtgactgggagactcacatcgccggtgggtgggcaaacaccactctccggctgagtcttccctaaccagctacagcctcctgcaggatggacccgcaatcccaacaacccaaggagaacaaagcttgcccacgaggcccagctgtgtggcaggtaactcctccacagccatgcctacacctttccactccatcacaagaggctctgtaattgatctgacataattagctctttactaagttatcataatttccagtgtgcagtgacaaacccattgatggatgattttactctacagcttgcctaggtacgaacttaagtgcaattaactgtcatcaattaatggaacactttttttctttaaatacataaattagatggactccacacttatcccttctctgtcttctcaaggcttgaaagataagcatagaggtgctgtcagaagccagttccttaagtactccaaggtgggtgccaacagcatttgaagatactcatcttccttgttttaagtttggtttcctagctgtcttttccacaggcaaccttttctgactttttagtaagggctgagataacaaaatgaattaaaagcctcagattttttttttcttttttttgagacaggagtctcacttcgtcatccaggctggagcgcagtggcacaatctcggctcgctgcaacctctgcctcccgggttgaagcaactctcctgcttgcctcagcctccccagtagctgggattacaggtgtgtaacactatgcccagctaatttttatatttttagtagagatggggtttcgccacgttggtcaggccggtcttgaactcctgacctcaagtgatctgcccacctcagcctcccaaagtgctgggattacaggcatgagccaccacgcctggccaaaagcctctgaattttcacagcccactcccccaaaggggtgaccttctacttggctttcttctctttctcccatggtcagctcccaattagttgcctctgctggtggctattccactattccacaggacctgggacccagtgttgcgggtagggccgtggtcttgctccacaccaggcacactgtcagtgcttttgattttacaccagagcttctcttcactggggtggaaaattgagaggtggcagcagaactgagaaatatttccctgttacccttttcttagacacaacttggctcaactctcaagagaattaaaaaaatcccccgtcaggcatacggtatatacatgtatatatctactctgtctcaaatatatatatatatgtatgtgtgtatatgtataatatatgtatacatatatgtataatatatgtataatatatatatacatatgtataatatatatatgtataatatacatatatatattatgtatgtgtgtgtatatatatatatttgagacagagtttcactgtcacccaggctggagtgcagtggcgtgatctcggctcaccacaactccgcctcccgggttcaagcaattctgcttcagcctcctgagtagctgggattacaggtgtgtgccaccacacctgactaatttttgtatttttagtagagacagggtttcactgtgttgcccaggctggtttcaaactcctgacctcaggtgatctacccacctcagcctcccaaagtgctgggattacaggtgtgagcgtggcccatatggtactcttaaggtcccacatgccctctaatatttaggtttatctttccatcattttgggtttctgtcctttcattcctcagtcccccaaattcctgcatgtgacacctaggaacaaagccagagagtaaatactatttccccatggtgacaggaacagcaggggggacagacagcagctggctgccagccagctgactcaccatggtttatcccttgatcctttcgcaggaaagactgtgtgctgtttgctgctggaggtaagtagattgtctttgggcgttttgaatggctttgaggtgctgctggcagagtgatggccgctgagacaggcttttgttttcacctgtactagtgatgtcctgggattggaggctggagacactggagagggagaaggtctacacattgaaccgtgtcttctctctacaggggcagaaagtagagaactcagcacagcatctgtagcaggtgaggctcccacacactcacatacactcaaacacacaacaggcggagagaagcgctttccctacagcactggcattcctgaagcctaggttctgatgagacgatttgtcttgacatatgctcctattccaccagctagcaataattatgttctgggtttctgtatcaaatggcatgctcaactaacatcagggttctcatgggaggcatttaccaggccatctttctgcaaaaccacttccacaggagtagcagagggacaccaggtgtcatctgaacagtgggacaaccacacatagccaaagcaattcctagacagctacacagaggccacaggtccatcagggcagtggacagggcaggactcttaacaaacaggaaactcttgaacctgacaatctgcaggagcactaaagtaagacggaccagcaggcttgaatcgaaaggactttgcaagcgaggaagtggcccagcagctgtcctgggactgagaggacagtgtcagcacacccctgctatggcctcctcagggtccacagagattgagggccacatgcaggaggatgtcaacgcttgaggcagaatctgcaatgtggggcatggacttgggccggcgagcacaacttcctgaggttctacagagaataccagagctctgggcagagatgcctcacttgttcacattctgttagccactgtgctttcgactgaatgggcaggatgaggatactgaccaggagagcagatgcatgaagtaaagttctagtgtgcacccgctatggggttcttaaattgttttagaataacagatctgataaaaatttaagaacccagcaaaacacacttttacacctgcccaaaaactttgtacatgattacaggaaggaatcccaaaccctaaaaaagacaaagcttcctgaaaccctaagtcctctctggctctcttatgtctcacacataattagtgcttaattaacatgtgttgaataaataaatgaaattataacagttctcctgaactagagatctgaaaatctggctgaatttgataatgcaaaatgtgacaggcaaagatgacagatcattctctctccagcccaaagctgagcctaggcttctctcattagggcacctttcctggttgcttttgcaggcaccctgacctgggagatgcaagcctcccacctgtggccagctgcgacaggagtctggggtttttctctgtactcccttgtaccaatgggttgccaggctgtctcaaagcagactgaatttagtcttctgatgcaatgggaattaggaggaagcagatttttgaggatcatccaattgctgggtttctttgcttgaccagtgctcatatgctgcctacaaagaataagtttacagggtgctttttcctcattgaatcagagtagacctttgcatacagcttagttctcagaagccatcctgttgaagcttttgaaaacaaagagctagttctggggcctctgttttgagggctgggagccaggagacctgggctcccactccaaccgcatatacacagtattaggctcgtggccttcagtttaccacttaaacttccttggttcctgtgtctttatctgtgaatgaagtgggtccctagatggcttcgaagcctccttccactcaatcaccataaatacaagggatacttacacctgttccttcccttctcatctctcatgattcctggatgtcagagcagtaataacagccaaaatattgaacaattttactcaggcaagatcttccttgggggaattcgtcctttgtaaaattgtactggcttttacaacccctgtgacacaggcaggaagcagccaggggtctccaccctcctcatggctgactggccaaaggagacccagagaggtgaggtgattgccagggtcagggctactcaaggatcagggtgcctctgtgctgagtacatgggcctacctgcctctcaggaaggcaggaaactaggtgaataaaattcgaagccaggaaattagaaaatgcagaacttagaatcactaaaggttagaactgtatcttaaaagtcaactagtggccgggcgcggtggctcacgcctgtaatcccagcactttgggaggccgaggcgggcggatcacgaggtcaggagatcgagaccatcccggctaaaatggtgaaaccccgtctctactaaaaatacaaaaaattagccgggcgtagtggcgggcgcctgtagtcccagctacttgggaggctgaggcgggagaatggcgtgaacccgggaggcggagcttgcggtgagccgagatcccgccactgcactccagcctgggcgacagagcgagactccgtctcaaaaaaaaaaaaaaaaaaaaaaaagtcaactagtatgatctttctgatagatgaggttatcagttgccagccttcaggttaaagctagttagcgacaatcctgagactagaaccaagtctcctaacttcaagtctatcgactttctgcctctcagaaatgtcttgtttagcaatttctttttcggcagaggcttccaatatgaaaacaagatttcaatttttaccattactgctttagatttttctgcagtcttcattcactcctttgctattacttactcaaagctggtggtgggtgggtgtgggatgtacagaaatatttcttggtttaggtggggagataaacctgaataatgaagatacgtttattttgctaaactaagggttaaaaattatgcaagtaaacaaagataaatcacaaggaagtgtgccatgaaggacaaaataaatgtgccaggccagtgattctacaatcaccttctaaaagaattctcgttagtggttctggctgacacattctgctgctaaatttacagaaaaaaccttttttttgagacagaaaaaaaactctgtcacccaggctagattgctgtggcacgatcatggcttactgcaacctctgccttccaggttcaagcgatcctcccaactcagccttctgagtagctgggactacaggcatgtgccaccatacccggctaattaatatgatcttttgagacagagtcttgctctgtggtccaggctggagtgcagtggcaggatctcatctcactgcaacctccctcaagagtttctcttgagcctgggagaatcaaggctgaagattctcaagatctcagtctcccaagtagctgggattataggcatgcaccatcacgcctggataatttttatatttttagtagagatagggtttcatcatgttggccaggctagtgttgaactcctggcctcaagtgatttgcccgtctcagcctcccaaagtgctgggattgtaggcatgagccactgcgcctggccccggttacttactaattaaaacttttttttggtaaggccaggcatggtggctcatgcctataatcctggcactttggctggccaaggtgggtggatcgcttgagcctgggaggtagaggctacagcaagttgtgattgtaccagagcactccagcctgggcaacagagcaagactctctctgaaaacatatatatatattttttttttgcagagacaaagtctctctatgttcccaggctggtcttgaactcctgggctcaagagatcctcttgccttggcctcgcaaaatgttgggattacaggtgagctaccacatctggcccacaaaacaactgtatcagtggataagcttttttcttggtttcatattttattttttgagacagtctcgctctgttgtccaggctagagtccagcggcgtgatcttggctcactgcaacctctgtctccaggttcaagcaattctcctgcctcagcctcctgagtagctgcgattacaggtacgcaccaccatgcctgacttatttttgtatttttagtagagacagggtttcgccttgttagccaggctggtttcaaactcccgacctcaagtgatccgcctgctgggattacaggtgtgagccaccatgcctggtttcatattttagattcagaaacttgccttaaattgtcaattgaaagaacaagttgcagtgagggaatattaattaaaacctgaagacagccctttgcccttaatataagttttttttggttgtttgatgtgtgattttgtattgtaataaataggcgaaagcagtatgtcctacttgtgaaactgaattaaatcagaagggctctcacaacccttgagctatgggaacaagcttgtcccctaccagtgcaggtgagaaaggtcatataagaatttaaaggcccagcacggtggctcacgactgcaatcccagcactttgggaggccaaggcgggtggatcttaggctgggagtttgagaccagccagaccaacatggggaaaccctgtctctactaaaaatacaaaattagctgggcgtggtggcgcatgcctgtaatcccagctactcgggaggctgaggcaggagaaccgcttaaacccaggaagtggaggttgtagtgagccgagatcgaaccattgcactccagcctgggcaacaagagctaaactccatctcaaaaaaaaaaaaaaaaaaaaattaaagtggagggaccaatagagtcagtggtcagggattcactctggaggtgagctgtagctaggcttttgaaaatgggtagaactgatgtcccaggtagggcagagtgagtggattttacaaaaagacctattcaatctttgtttctctagtctatgaagacctgcctgtagtggacttacacagttttgcgttggtgaggaggcgggttaggttagtgatagaagaaggcagggtcttatcttttgcaaaaagacgctgctgtgcaggtgaggtttctctgagtgaagctctcctgctgtacattacaatcattcagatacaagccttcacccacttgaggctcaatcatgtctttctatgttttgattaagggactgcctaaggtagatccctatagttattctaattccatttgccctgcccagaaagaatttgtagtacatgatatccctcattgttaaaatatttaatacttaagcaattttagagaaaaagagcactttcctctaaattttcttagtcttcgttaatgcatatagctttattaagaaaactgcaatcaatggatattttggactattctttgtcagctaacattctacatatacgtatcaaattcccacaaacttgctattttaaactgttaggtaatattcaatcattaacatggcgcagattatttagctactctcttgctgtctacctactatttatctttaaaaaaaaaaaaactgatttggccgggcgtggtggctgacatctgtaatcccagcactttgggaggccaaggtgggtggatcacaaggtcaagagattgagaccaccctagccaacatggtgaaaccccatctctactaaaaatacaaaaattagccgggtgtagccgggcgcggtggctcacgcctgtaatcccagcactttgggaggccgaggcggatggatcacgaggtcaggagatcgagaccatcctggctaacacggtgaaaccctgtctctactaaaaatacaaaaaattagcccggcgaggtggcgggcgcctgttagtcccagctactcgggaggctgaggcaggagaatggcgtgaacccgggaggcagagcttgcagtgagccaagatggcgccactgcattccagcctgggcgacagcgagactacgtctcaaaaaaaaaaaaaaaaaaaaaaaaaaaaattagccgggtgtggtggcgggtgcctgtaatctcagctactcaggaggctgcggcaggagaatcacttgaacccgggaggcggaggttgcagtgagcctggattacaccactgcactccagcctgacaacagagtgagactccgtctcaaaaaaaaaaaaaaaatttatttaaaaagtgattcagaattatttccttgaggtataattcccaaagtgaaaggctgcagctttatagctcttgctacacatttctttccagaccgtgtaacagaaagaccaaaccaatctactgtgctaatattgaatataagcaccactcacctactttaggaaaaacagaaaatcactatcagaacacccgtgcagaattaagtattcaatacatcaataacaacctcagtgaatgatcttcagccagcaacctctgctctcacccgttctgtcctttgatcaatagtaataatagttttaagatttttcaggtgggtacagtggctcatgcctgtaattcccgcactttgggaggctgaggcgggtggattgctggagctcaggagttcaaaactagctgggtaacatggtgaaaccctgcttctacaaaaaattaaaaacaatcagccaggtgtgtgcctttagtcccagctacttaggaggctgaggtgggaggattgcttgagcctgggaggtcaaggctgcagtgagctgagattgttccactgcactccagcctgaatgacagagtgagaccctgtctcaaaaaaaaaaaaaaaaaaaaaaaaaagaatttttttttcttatgtgccaggcactcttctaaacactttgatttaccttatagcatttcattcttacaataccttaagagaggcacggccgggcgtggtggctcacgcttgtaattccagcactttgggaggcccaggtgggtggaacacgaggtcaggagttcgagactagcctgaccaacatggtaaaacccggtctctactaaaaatacagaaattagctgggtgtgatggcaggcgcttgtaatcccaggtactcgggaggctgaggcaggagaatcacttgaaccctggaagcggaggctgcagtgagccgagatcatgccactgcactccagtctcggcgacagagtgagactccgtcccctgccccccccaaaaaagagaggcactactagtttctcttttctacaggtaagtttgattaacaaagctgtaatcaatggatattttggactattccttgtcaactaacattattctgcatatacatatcaaattcccacatacttgccattttaaactgttaggtaatattcaatcattaatgtgctgtagattatttagctattctcgtactgtcgacctactatttgtcttttaaaaaactgatttaaaaagtgatttagaattatttccttgaggtataattcctgaggctcagagatacaatgagttgcttaaggtcacagagctagaaaacatcagatctggggatgttttcagagcccctgtcttaactctgggctctaccaccttggaatcctggaagattctgctacagataggaggaatctgaaagagccagcgggacctctcctttcccactgtctgtgggcatttcagcagggcacctgactcccctagggagaggaagaaacactttttaggtgttaggcagctggcaggtaccagtcagcagctcataccattgcctaagacctcaatcacaaagagttggggggccccagtaccaaagaaatgaaaagccaaatccttttacttttgtgcatttccaccacaggaagtccaggccaaggcctcagcagctgactgtttcaagaccacctgcttccccacagcctccttaaacatccaggtgcaactccaggggcagtcctggagatcagccaagcagggagcttgcagacaccagctgtcagcatcccaaaaatctgataggcgcggggaaccctggtgtctccagtttgctcccctcactctctgaagataaaatccatcaggttctcaggcaatcccatttcagtaaaaattcagtgttcccttccccatacgcttattcatggagatattttcatacttgcagcatcagtgtcctgtatttaaaaccttagcacagatgcctcatgaatggctgagccggctgcaaatactcaaggtggctccctgcaccatttttagaaagaacttgttgagaattttccaatatggcttttaagggactaaccccctcccaatagactttgagcaccacagtcgcttgtggcctgccatggttgtgtaagcacacttgggcttaggccagcacctggcttactcacttgacagcatggagtctccttcagcccccacttttgagggcaggtgcttggcaagtcattagccggtttctatcttatcagtgggttcaatctgcttttgtagctgcagtcaggatgctgcctataaacaccctgatttccaaggggccttcttccaaaagtaaactggagttggagagagaggcagggctggcaccttggcactgggagccgtgccaggagccaggccagctgtacttacagccgcttggtgaggtaacgattccccccagctgtggaaatggagacagactgcatttgagaaacttgcccaaagtcataagactattaagtggaggagcttgggctagaacctgggcctgttgtctcatttgtcaccatcgtagttagatactaaacttactgccatggtgtaaggggggatattgaatcagccttgctcagcagaggaggaaatgaagacacaggaaagtcaggtgataggacaggctgcgaatgcaggcagagctgtgccaagcagtttccatgccaggagtgcttgtgagcttttctggagtgcccattcccttctcagactgcagtacctctttaaaagatggcagggctgaggagccgaggaggcgttccttaagcaaaggttatgctaggtcttctttacccctcttcacctcctacccactgctgggcaacatgacctatcttgggcactaagttcttttgacaaatatgagtgtgggcctgtggtctacactgttcacaccaacaccagctcagttcccaaatccctaggctctgggatggtttcttcgtcatctggtcaccccatgcacattcattcagttaggagggaaagcaggctttcttgagtacctactatatatcaggcactgtgtaagctgcttttcactcaccagctcatctacccaataaccctaccatgtggtatgataccgttagttgccttgttatagatggggaaattactattatttttttttcttcttagatatcagatgggggaaattaaagcttagcaagattgtgaaacaagaccaaggtcacgcagacctcagcagctggcaggaaagcccaggcttgcctggccccagagccaatgccctttctaccatgccaccctgcctgggatgttcctttccctccacgctttagaaatgcaactgggatgattcttacaagggcatttcccattccagagctgctgtgaagtcatgtaacttaggatcctttttaacttttcccctgtggtggcattcccccttcctcctcctcttctatttgtcatttatactaaggtgcaaatttctggcatcaccactattgggcaggatctggggagtcccaggggctttccagggccctgaaatacttccatcagcccccagggatgccctcacaagacacctagactagctaaaaggaaaaactacagaaatagaatctgtggggagacaagcacatgtacaccttgccagcggtactttcaagggattacatttttctggagagcaacctggtgataataacaggaactaaaaagcatccatagcctttcatctggtaatctggtaatgtaagtttggaaaataggcctccaggaaatatcccaaagggaaaaaaaaagttcaaagatattctcagcactgtttactacagttaaaaaaaaaaatactacaagcaacctgaataatccataataaagcaattggtaggagacaggtaagagagttatctcaacctaagaaaatgtatgcaaaatagtacactcacattcacaaggaaattcaaaatggcacaaatagtatgtagagactaatcactacttaaagaaaaatatttgaggctgggtgcggtggttcactcctgtaatcccagcactttgggaggccgaggtgggtggatcacttgaggtcaggagtttgagaccagcctggccaacatggtgaaagcccgtctctactaaaaacacagaaaaattagccaggcgtggtggtgcatgcctgtaatccccgctactcgggaggttgaggtgggaggattgcttgaacctgggaggcagaggttgcagtgacctgagatcacgccactgcactctagcctggtgacagaatgagaccccatctcaaaaaaaagaaaaaaaaaagcacttgataaatacatgatgatgaggaaaaaagagaatgatataagatgcattgcttaataggctctgtcttttttaaaactgtttaagttcatccaagaagataaaaacagacaacaacaaaacactaacatatccttaagcagaaaaggtggaagagagaaagtaggtgccaatacaaatgcaggaaggagacaaaaatatgggttaaaatgaaagctatttcattcattcattcactcttttttttttttttttcttagcatttccttggcacctaccatgtgccagacactgggctatgagccctgggttattacagtgatgatacaataggttgctgtcactgctagacctttgtcatcagagggcttcctgtgctcaggggacagcactctccagatcctggctcgctgccacagttgtcactctgagtggaggagaacggacgcggccctcagaaggcaagctgctgcccgaaggacctgagtctgccggactccacctggagccagaaccacgatcctcttcataacatgaggccttttatggctctatctgctccccactgtctgggcccagtggtagcagaggggttgacaaggactccacatgcatggcactgaacttctccatcagagtagccccctccaaaaccacaaacacacaccgcacaagtcacatgtgtttaaacacaggagtcaccacagctttggtgaaaactgggggctaccagcttgcagataagctgttgaattctaccttaggatgacacagctgatatcgcccccagagcactgatgggacaggtatggcagacagctggacctgggcacgggggagccacagaccccaggatcttggggagaagatccatgagctgggattccccatatttaaaatacctgatagaatggctgggcatagtggctcacacctgtaatcccggcactttgggaggccgaggtgggtggaccacttgaggtcaggagttcaagaccagcctggcccacatgggaaaactccgtctctactaaaaatacaaaaattagccaggtgtggtggcatgtgtctgtaatcccagctactcgggaggccgaggcaggagaatcgcttgaaccttggagatggaggtagcaatgaaccgagattgcgacactgcactccagcctgagagacagagtgagactctgtctcaaaaaaacaaaacaaaacaaaaaaccccccaaaacaaacctgcacatgtaccccttgaatctaaaagctgaaattttaaaataaatacataaaaatacctgaacagctggaccgaatcttcccaacgctgtcttgaggcagcatcagtgacctttgccctggtgccttgagctaaggcctcatggcttgccaggccccgtggagggaggatcctggctgcaggaggcagagcaggtgccaggctgcacttccacatcagagaacacacagtgcagcagccacttctttacttttggacagcagggccagggcccccaaatctgtgattttttaaaaggtcctgaggtgattttcatgctccatgagcttcgggagtcactggaaatgccgaccaaacatgctgtctttggaatcagaaagatctgggctcaaatcccagctctgtcactcattagctctgggacttggggaaataacttaaccccctgagccccagtctccttacctgtaaaatggggacaataatacccacatcatggagttacaacaggacaggtgctcgagtacactgagtccctcatcttagcgcacatcacacgctgtaattactggtttactggtctaagtgtcctgtgcctggacacacccagagggcaggtgtcctgtttactcttttatctccagcgtttagcacagggttttgccctcaagagcactcactctattcactgtggaataaatgggtgttgggaggattgataacatgtagaaggtggctaccacagtgccaactcatgggagacgcttaacattaagttcccctgatacatgataatgtccattaaaaacacacacacaggtagtagctttcctcagtaggcagttctcagccttatccctgcccctgaattaaattagtccacttacaagaatcctatgggagcacactgtttaaggaccacaggctgataagagaggccaccactgctttatttctatctgtaccagtgtctactttcaacagcacagggccatggtctcttataagagaaggtgaaaagtctccactcactgctaagctcatggtgtcgctcagagccactcaccccacagactgtcgtggtcccacagcagccactaataacggaaccatttctgttctccttggagtggcagttggcagcggcaaacaggaagttgtcttgaagtagggtgtggttatgccctgtcaacatatgcgtacagacacatactttttttttttttttttcctttctggcccccttttctctcccttctttagaagcaaaaggtctgagttattttggtgaaaacaaactttttacatgatttaagatcaaccatcactaccacacaaacaaaaacccaggacagaaaggggcctaaaacacagcaaagggtctattttcctgccaccagtcactcgcttgtggcatttagttaggaactgactgtgtgtgtgagtgggtgtgctttttcccctttatttctctgggcacacaggaaacagagccctagctagaaaccagccagacacgctgcccagcatcctagtgagcccgtcagtccacctgtgggccagtcgcctgcgttgattcagggcctgcagtgtgcatgcactggacaaggaccatcgtggacaggaaagaaggaaaaaaccagggtgctagtttcaaacaatttgtacagtttgaatagaaaggaccctgaacatgtcttaacacaaagtacatataaaaacaacaaagaaacacaatgactgagtagataagtgcactgagtagataatacacggacataaacatggggcgttggggttgacacgccgggaaggttcattgcagctggcttcccggtgctctgaaaggtgtgctagaaaattttccactccactccttctcaggccggaggctggtgcctccagaagggctgtccaaaatagactggtccccaacccagcctcctactcctgacctctttctgaggcagctactctccccgctccccgcctcagccctgtctcggctccagctccagcccacagccggagagcactgtctatgctaacactcattttgctaaatgcctcgtgggctgccagcatgatctgcctgccaggatctctgttccgtgacctgcgcccagccccacgccgtcctgtgtggccctcgtgccctgcgctcacacttacacatcccggggaggctgccttgccgtttggataaggaggctgacacacgctgggcaacgcgactcgtggtagtagatgtttcctggctcctggatgagggccctggccagtcagaacgcaccacttcccctttaagagagcacgcccagacgagattagggaaaggcagaaagaaaagcccggaacagtcagggttgtatcctgaatttggcagatgaacttgggtattcctgaaccacacacacaaggtgtggtcagaggcagcaggctcctcagaggagtatcagagccagcgctgtgtgtgcagggctgggcctttccgcagccctggagctgctgtctgtctggcctgggtccccggtccccaggcagcctgaagacacctcaggccttcccactccctcttcgctcagggtctgaccatcttgataggcagagtccacttcattacctagcactatgccttagagagagtagagaggtcattataatgattggaaaatacttttgtgggttgttggaactattgatttaagcagggagatttcattcattctggatatttagaaagtttggtccctgatcttggccaaggacagtagatttggaggggggagaatgcctaccaaaacaatggttcacaaaggccacacgttatatgaaatgtccagaataggtaaaaccatagagacagaaagccgacttgtggttgtcaggggcaggctgggaaaagaaggcggggggagtgactgcttaatgggcacagggtcttctttaggggtgatggttgcacaacattgtgaaggtactcaataccactgaattgtacattttaaaatggttaattttctgtgatgcaaatttcacctcaattaaaaaaaaaacagtggcaaagtacgctttgcgcatctttatcttctgctaggacctctcctgtgtggcatccaacatttctttgcaaaacctggttattacctgatgaatattaaatcaaccttagataaggggtacatgccttttagtaaaaaaaaaaaaaaaaaaattaaacctttaagacacaaaagtattccaagactcagaagtatgattttcctggagaattttggactgtggggagacagcactccctcacgtcatgatcacatacttcctctcatcacacacaagctaggcagagcctactaggcattagagagattagagagggcattataatgactgcctatgtaagatggtctcctgtggggaccatcccttcagccacttgaaaacataaccaaagccagagacagtgagtcccccgtgggagaattattcagggagaacatgactggacttctgggttcttggcttccttttcccctcttgttgagagagtttcttcccagaattgaggagaattcatcagtttcagattgagagggagttgtgctggctggcaaagcagaactagtttccacagttccatttgtttggaatgtagtaggggggtgttgagggggtataaactgaccacccatctgaccagccctcgttttcagtcatttgcagctttggctggagattgtctgttcccaacagttaggctgtgggcgttgttccctgatcccaggctagcaggtcaagggcccctgggcacattcccttcacccaggggactgtggagtagaggcctgctggatgttgcaatgcttagaagaaacacagatgaaagggcaggcccgaggcctgggaacctgagtctttccagagaaaaacgtgagttgctttcctagtatctctgcaaagagtttcaggatgacctggaggacagagatgggaacagctactcttgggccagctctcccagagcaatctggaccttctagagcattggcccctgcctcttgcagccctgctctccctccctatctcaggtgcccgtgtaggctcttggtagccttacacctgaggtagcgtaagttctcagcaaacatgtggcttaggataataagatgcaatatttactctagcttctgaagagcagcaagtttagaaccgtaactctaaatacaaaaacaggcaggttcaatctaatttaaaaatgggcaaagggctgggcacggttgctcacgcctgtaatcccagcactttgggaggctgaggcgggtggatcacgaggtcaggagttcgagaccagcctggccaatatgttgaaaccccatctctactaaaaatacaaacattagctgggtgtggtggtgggcactaatgactccagtcaccagtcattagggaaacgcagatcgaaatcacagtgaggtatcatttcacacccactgggatagctgttaacaaacaatgaaaataacaagtcttggtgaggatgtggggaagttggatccctcgtgcactgttggtgggaatgtaaaatggtacagccactatgaagaagagtatggcggttcctcaaagaattaaaaattgattcagcacatgatcacacgatctagcaatatcacttctggatatatatgcaaaagaactggtatctcaaatgtgggtatacccacattcatagcagtattactcacaatagtcaaaaggtggaagcaacccaagtgtctatcaatgaatgaatagagaatcctataatggaatgttattcagccataaaaaggaaattctgacacatgctacaacctggacaaactttggggacactatgctaagtgaaataatccagtcacaaacagacaaataatgtatgattccacttacatgaggtgctcgagatagtcaaattcatagacagaatggcggttgtcagggattgcaagggaggaggaatggggagttattgttcaatgggtatagagtttcggttttgcaagataaagagttcaggagagggctgggcacagtggctcacacctgtaatcccagcattttgagaggccgaggcaggaggatcttttgagttcaggagattgagagcagcctgagtaatatggcaaaaccctttctctacaaaaaatacaaaaattagctgggcgtggtggtgtgcacctgtagtcccagctactggggaggctgaggtgggaggatggcttgaacccaggaggcggaggttgcagtaagccgagatcactgtactccatccagcctgggtgacagagctagaccccgtctcaaaacaaaaaacaaaaaacaaagagttcaggagaggatggtggtgatggttgcataacaatgtgaatacacttaattccacagaactgtacgttaaaaattaagatgggtaagtttcacgttaagcatatttcaccaaaattaattttttaataaaaaagttaaatatagaattaccatatggaccaaaattccactcctaggtatatatccaaaggaattgaaaacagatactcacacaaatccatgtccacaaatgttcatagctgctctattcataagagccaaaaaattggaaacaacccaaacgcccatccatggatgagtggataaacaaacactgtgctacatacatacaataaaagaatactcagccataagaaggaatgaagcatgatacatgctacaatacaaatgagtctcaaaaacatgatggtaaatgaaagaagccagacacaaaaggtcatatatatatagtatgattccatttaaatgaaatgtccagaataggtaaatccatagataagaaaagcagattggtgattagcaggggctgtatgtggtgggggagggggaataactgcttaatgggtatgaggttttattttggagtgtgatgaaacattttggaactagatagaagtggtggttgcacaacattgccaatgtactaaatgtcactgaattgttcagtttaaaacagttagctttatgttttgtgaatttcatccaaattttaaaaaagcctgcagaaagtaagagcaaggataatctacagcagaacaattagtttcaagataactgagttacctttaaaaccctttctgaaatcacttaaaggaggtaatttttaagttaaagtaattaaggcagccagcaggatacagcaaacaggcactctaagacagcagttcccaaacgctaatgctaccaatttgggtccacaaagaagtgttaatttgtcttaaacaatgtgatacataaacacacacatgcatacacatgcatatgtacatacagatttttctgagtttacatcctccctacctttctgcgttaggatctcctttacgtattgatactgaagatagactggttgtggtgctttgttactctttagggggtgttgttttggttttagtgcccatacttcataaaataaaacctgaattcagggccaggcacagtgggtcatgcctataaccccagaactttgggaggccagggtggcagatcacttaaggtcaggagttcaagaccctcctggccaacatggtgaaaccttgtctctactaaaaatacaaaaattagccgagcgtggtggtgcacacttgtaatcccagatactcaggaggctgaggcagaatcgcttgaatcaggaggtggaggttgtcgtgagctgagattgtaccactgcactccagcctgggtgacagagcgagattccgtctcaaaacaaacaaacaaaaaccctctgaattcaaacaactaccaccgccactaccaatgccaccacacacaaacacacgcacatgcacacacacgaacacaggctccactagctatttacaaatgggacactgaggcacagctcttcctcttgccaacctgatcgttcatccctgatacagccgccatttccataaaggaatcatcattctcccatggactcagatcttagaccttgaagttgggactaacagactctcaacaggcaagaaaaaccccacaggtaaccattctctgcaggcccccttcttcaggagtgcagttgctcatccacactcctgcccaggggctgccaggcatagcttcactgcaggctccatctggggcggtgcatcaggtaagcagtgtgccagataagcggtgagccaggtaagtggtgtgacagtttagtggcacctcccgagttcagtcccgactgttgaagagttctcctttatgccaagctcccgtgtaatgaccactcatgaatcccatgtctgcgttgtgggagtcactatgaaccagtctaatcccccttccatggaacatcttgccaaatgtttgttccttgaaacttccttctctcaggctaaacaccctgagatgacttcttaaactattctttacaaagcatcattttcattactccctgatcttggttctcttggctcctcttgttcttcacagaccatggaactcagaagggagagcattacagatggggtctgaccagctcctacagatctgttctggacattattctcctattaatgcagccagagatccaatctagattttttatttgtgatagctgcctcatccctaagttttatttcacacattttgctgccaagctgcaaatccacaggtatcctttaaaaatgtcatcttgttggatttagtctactgctccagtctgttgagatctttttggactctgattcattaacataatctgctctccctcccaaatctaccacctgaaaactcgatcggcctgccatcaatgccaatcttcttccaagtgctcatacacaacgtggaagaggacaggcccaagagggcaactcgatacatccctcagtgcaacagtggcctttgaaaagcactcttgagatatggttgtaccgaaccatgtgccattcagggcaggtgtctcacgtggcccacatttcttcatctccctggtaggatcttgtgggtgactttgacaaatgggactaatgataggcctcctcttactgttggttgtgaaggttaagtgcaaagttctttaagcagggtattacacacaatgagcagtccaacactgcctttagtacagagaagagatgataataataataataataataataataataataataataataaatggttttccaattcccagacaaactaccttccttattggcaaccacatacagacattagaaagctgtaatctatagaaggagcactgacatccaagagctggagtccaaatcccggctctccttccagaatgtctatgctctgaggttagcagtacctcccctctccagcgctatagcgaagagtcaatgacatcaggcatgtaaaagaggtttcaaagttgagtcagactatgcaaacataaaagaatagtatgctgattactgttataaataagtcaagataccatttccattggcagagacctccctgtgaagccaaggaggaacctatagatgtactcaggctgacaggaggaacaggtctttcagcacacagcagctggattactttgataatgagattcctgatctcctctcctggtagcaatcatctcctctctcatctcagaccagagccaaagctggcttataaagaaaaaggagtgggtcttcctaccatatttgcagaggggcccctcagcctgtgggaacacactttctctccatggtccccttgttgagaccagaacctgagtatcagcagcagggaaccggcaggtgatgaagggccgtgagagttacttttagctcccctacggcttgaccccagtcaatccctgagcttccatcctggatggtggtttctaagaacaactaggctttaggctctgacattctcagggcaggttctcagaaaccctgttctcactccagctgaggatgttggtgtcttcagggaataaatggtcttcactaaaaaccaatcttggaaacattttgcaaagcatggtcagaggtcacctgttggcctttagaatctcaggatcaaggatatcccacagcaggggaagaaggagaggaagtggcatggccaaacacatgcctctgagaagagagcagcattaagatgggaggcaataactaacataaatgaattttcctctcctcgtccatctaaggttagtttcccaacttccagggggaatgaacactaagggcagattaaaaaaaaaaaatacacagatgctctctgacttacaatgggattatatctggataaacccatcataaattgaaaatatcgtaagtcaaaaatgcatttaagggccagtcacagtggctcatgcctgtaatcccagcactttgggaagctgaggcgggtggatcacctgaggtcaggagttcaagaccagcctggccaacatggtgaaaccccatctctactaaaaatacaaaaatcagcagagtgtggtggtgggcgcctgtaatcctagctacttgggaggctgaggcaggagaatcccttgaacccaggagatggaggttgcagtgagccaagattgtgccattgcactccagcctgggtgatgagagtgaaagtccatctcaaaacaaacaaacaaacaaacaaaacccacccatttaatataataacctactgaacctcatagccttagcctaccctatcttaaatgtgctcagaacataacctacagtcgggcagaatgccctaacacgaagcctattttataataaagtgttgaatatctcatgtaatgtattgcatatcatattgaaaatgaaaaacagaatggttacatgggtacttaaagtacagtttctatggaatgcatgtcacttctgtaccatcttgaaaccaaaaaatcataagtcgaaccattgtaagtcagacaccgtctgtatctatatgtaattgttggcaagacactgagaggtttatgccaatgaatctattaacagatcagggagttggcccagaaaggaggtgggagtgaaggggcccagaagggaaggtaacaattcctgacatagtttctggagcctactggtccacaagcttcccttactcaacctacccctaataagagtctctctcgagacaggtgagctgccacagtcacctgagaatcatcataagccatatgaaagctaattcagactttcatagccactgatgacttttaaacatattcctatctttctctcattgcatttcctttgactatgcacccacacagagatggcgcctggttctataaactgatgcatgaggggaataaactcacagatgaatctgtaccccatggaggttcctgcaatgttctgatgctgaggcaggaccaggcttggcagattggtgttatgggttaaatttctccacttcagacttcatatgttgatgtcttaatccctagtacccgagaatataagcacatttggagagaaagtctttgaagaggtgactaagttaaaatgaggccattaggatggggccctaatccaataggataggtgtccttaagaaaaggaagggacgacaatggcacaagtccagagggtggatcacatgaagaggcggcaagagggcagccatctgcaagccaagaaggggcctcaggagaaaccaaacttgctggcaccttaatcttggacctccagcttccagaatcatgagaaaataaactttggttgttgaacccacccaggctgtttcattttgttatgacagccctatcataccaagaccaatacctaaaaaccatgcaagttcactagatcagggagaaaaagtataggatggaggcagaggcctaggtgcagctcggatgcatcctcctccttgggctgtgtttcagagcagtgtgacagagcaggaatgtggcctggcttcagctacccgcagaagagcattctttcatgcattcccactgaccatgagacccacaccactacctcactgacaccatacccactcaccccaaggctttagtcatacaaagaaaagagccattctatattgttcttcggtgctctcataatgtttaaccatgctttttacttaaagaattccaggaactggactgaagagatccaaaatatggaaccaaggttgcggagtgtcccacctcaggaaggaatgctgaacaactgatttatagccttgttgttgccggctagaccaccaggtggcccatgactcaagataatcatcacaaccagatacattgacttgcataccctaaccctcacatgcgttgcccagcccagcctgcataccctaccctgatatcaattcctgtacttcgcctaataaaaaaaatcccaactggggacggacacggtggttcatgcctgtaatcccagcactttgggaggctgaggcgggtggatggcttgacctcaggagtttgagaccagcctgggcaacatggaggaaaccccatctctactaaaaatacataacttagctgggcatggtggcacatgcctgtagccccagctacttgggagggtgaggtgggaggatcacctgggtccaggaggtagaggctgcagtgagccgtgatcgtgccactgcactctagcctgggcaacacagagcaagaccctgtgtcaattaaaaaaaaaaaaaaatcccaatcggctgttttcagagggtcagtcagggaattctctctctctctaccttatgccctggcgtaagcgccaatgaagccttgtctgggaagactcttttcgcctcatttctattgcaccaaaagcccaagaacccatggtcagtaacagcaaggtcaaggtgggacaaatctcctaaaccctgataactggcagtctgcctgccctgaagtcctgaagctgaagtagtctacaagtacacggagcaggtgtgagtagctggtctgaaaatgtatgactccaggtcatagtctgggagtgatcaactccttttatcagcttactttcttgtttcacctcttacccaaaaagtaatctgattactggttctaattaatgtatatgtcatggctgttgttccagaaaagacaagaccttgggggtgaatggactatggcaaagtgaggtcgctgttagcagactcccaaaggtttgacgaaattacacagaccatctggctcagtgctgcctttggctgggaattcactggtctctaggttctgcctgggtgccttggtcttcccggagtgtagggtggacagaaccactcccctggggccaagagagaaggagtgggctcacaaatgctcactgctgctaaggtgcccagctgccccggatcaattaagtttaaacagcagctatgtcactggggctggggtggagggaagaatcaaagtgaggaaggagggtgtttctaagatattggcaggccaatgtctggagggcctgggaggggcaacgtgctctaggagacagagctgaaaggcctttactttcccaaggatggcagggtgggagggtttagctcattcaaatgcaaaagcctttcagtatttactgccactcctcccagctccaacataaaggcctataggttctcttcacatctttccattcacttgggctgtgggggtgattgacacagctgggggcagcccccataatcattcctagctgagatgcatacaaaccaacacacacctcaagcttgacaccttacgaaggtgggccgaaagtcctcccggtcccaaccagacatacggaggaggcacggggaagtggaacagaggccccacacacaggggcagatttgaatcaaattagaacaaagagtcccttagcatcgtgtcatagccagttagcccagagcaaatgggggcatgaggaggcgaaggtccgatggatcatgtccgagcccgagttttagcttctcagctcccctgtatgagccaggccccaaagccaggcttttcctactaggaccaaagggctggacttggcccccaccagctcagtggggccagtgtgagaaagcacaggacagactctaaacgtcaaaggcctaaagcaaggaagcctcatcattattctctgcaaggttaaaggagacagggcacttctttttttatttttgagacggagtttcgctcttgttgcccaggctggagtgcaatggcgcgctctcggctcacagcaacctccgcctcctgggttcaaacaattctcctgcctcagcctcccgagtagctgggattacaggcatgtgccaccatgcccagctaatttttgtatttttcgtagagacggggtttctccatgttggtcaggctggtctcgaactcccgacctcaggtgatccgcccgcctcagcctcccaaagtgctgggattacaggcatgagccaccgcgcccagcaaaaaaaagcattcatatgaatgagagaaacatggaggagaaaagaaagcctctcttggcagcactcagcagttagaactatgtcaagcctcatcctaatggtcacatttaccaccttggaaatttccgttttcactgtccgttctcattcatgtgatgctgggggtggggttggacccatctgtgtgggactcaaggtcttggatctaagcagacccgctcctcagaaggccttccgtgaggcctaaatgatgtttgtcgtcttctccttcttttgcgatttgtttagtttaaaatatttaacccgaggcacaatgaagtgtctcatttacaaggttctcccggaccattagactgggactccacattcattatgctgatgaacgcgctacttactcatgcaaattccaagagcggcagactcagagatgggaggtgctcaaggtacgatatcaagggctgatttaattacacagccattcagtgggacaagcacggcaatttttagccaactgttctagtaaatattacgggaaacccttttatagagtgctaattccggcttagtgttttcgctaagctttagttcttactcaaacatgcacacgggcccccaaagatgctaccaccaggccagaaaatcacacagataaagcatgagcccatatgccatcttgcagtcaatcatccttttaaaaatgttataaatgtctgcatatcactgtcatttaggtggggacaaactaaggtccagtaacttccctgtgtctgttcttcctccgtccccctcccccgtgactctgagtcctgcagaccagcccttgggcatgttttgggtcaccaaatgccactgctcccaggagtttgacaaaacaaccgctgtaaactcatttcagacgtttgaaacaatacccaatcactgcatccaccctcgaggagcgccccagaggaaatggcatcattactttcattttactccgtttgtgaacgactaaaggaaaacaacacgtcctaggactctcgggaacgttattaagtgacccctaagaaattaatcatcaagagctaaaataaccctctgctgcacatacaccgccgtttctctaagtggagaaacaaatttcactttccacagttggaacagaaactcttatgcatccccgtttcttcaaaaaaaagtctataaataacctaggatcagcaaaattatgcaaaacatcctgctagaagaagaaatgtaaactaaaaccacttacagagagactcaggctgccaacttaatctgatgctacgacgactgtaaacatgttgtacttttggaacctgaagcgatccacattagcacggatgtcagtaaaaaaaaaaaaaagaaaaaaaaaaagagagagagagagaaagaaaaaggagggaaaaaaatcgcaacgactaaacaacaacaaaagcccagccccaaacagagcaacgtgatacggtattctgcacggtgcacagcccgacggctgaccagctgcagtcaataccagctatccgcgcttgcacacgccaactgttttgactacacgcacttgttaaacacggagtttcaggtcctaccagttggacaccagaagttcatagaactgacccagtgccaagaacaacaagcacagaaagcgaaccggctgcctcgtgcgggtgtttttgttaactgtttatgcaagccccaaagcaattgggtaacaattacgaataaaaaagaacttaaattacaaaagcaaaagattaccaccttgaaggaaatgtagatattggcagctgaaggacagacgtcatgctactttattggtggggtgggtgggtagttttcagagagaactggttgggggagggggaggtgtcacatgacacactgcggttattagcagaaggaactgggtgcttcctcgaagcatcttttagagattgacttagattttgcaaatgtggaggctttgctgcacatgtgggggtgatggcaggagcactagaatttgtcagttggtaaatcccataggagaagaaagggacatgctggatgaatttctttctttccttccttccttccttccttccttccttccttccttccttccttccttccttcctccctccctccctccctcccttccttccttctttttttgagatggagtctggctctgtcacccaggctggagtgcaatggcgctatcttggctcactgcaacctctgcctcctgggttcaagcaattctcctgccacagcctcctaagtagctgggattacaggcatgcaccactacgcctggctagtttttgtatttttggtagagatggagttttgccatgttggccaggctggtctcgaactcctgacctcaagcgatcaacccgtctcagcctcccagagtgctgggattacaggtatgagccaccgcacccagctctttcttttttagagaccttttgctctgccacccaggctgaagtgcagtggtgccatcagagctcactgcatccttgaattcctgggctcaagcgatcctcccgattcagcctcctaaggagccgcaccactgcccttggctaatttttaaatcttttgtagacacggagtcttgccaccaggctggtctcaaactcctggcctcaagcgatcctcctgctttggccttccaaagcactgggattacaagcatgagccgtcatgcccagcagaaacacttcttaaattgcttattttaacaggcttttccatttttcccagagtgcatcaagcagtatctcactgtaggaccaagagaattaaccaaataaaattttagttacctgaggagttcagaaaacaattccaagagaacctgggtgtggacgtaagagtgagaaattttttttgtttttgttttaaatagagacaaggtttctctcttgcccaggctggagtgcagtggtgccatcatagctcactgcagccttgaactcctgggctcaaggaatccttctgcctcagcctcccaagtagctgggactataggtgtctgccaccatgcctggctaatttttaaagtttttgtagagacagaatctcactatgttgcccaagctagtcctgaactcctggcctcaggcagtcctcccgcttgggcctccaaagtgctggggttacaggcttgagctactgtgtctgaccgagtgagaaattttaaattgctgggtggacttaaatctaatgccccatccatccatccatccatccatccatccatccatccatccatccatctaatttgaagaataaaatgtcacccccttcccactccacaggttttggggaaagtaatgagtaagtagaaacaggctgtttggaaaagccactgtgactgtgggccagcttcacctttgttttggagagcaaaggttgctcttctggttacggggccaccagcgccatggtggtgaacaggaacccacatagtggctttctctttcccctcaaagtaacccacattttattaccaactatatatagaaattgtttcactgggatctgaaatggagccaccctggagtgaaatgcagcagttgcctgatacatcacaggagaagagcaaaggcaacttagcacatccaagaccaaggaaggagcaggggaggaagaagtcgggagcaagaagtctggggtggggaaaggaggagggtggaagggatgcagcaagagagaagtttcaggtcctgagggagaagtgagcctttttttttttttttaaggcagagtctcgctctgttgcctaggctggagtgcagtggtgccatcttggctcactgcaacctccgcctcccgggttcaagcaattctcctgcctcagcctccccagtatctgggtctacaggcacatgccactgcacctggctaatttttatatttttagtagagatggtttcaccatgttggccaggctggtctcgatctcctgatctcaggcaatccacctgccttggcctcccaaagtgctgggagtacaggtgtgagccactgcacctggctgagaagtgagtcttcaatcagccctgtccttggggtcagcaactgttaaagtagccccaggatttctgtgggttaaaaccccacagtttatgtctctttcatgcacattacattatttgatcctgtgaggtgggaagggcggctattattacccccattatgaaggagggaaacagggttcagagaaacctgtgactttcccaagttacacacccaggaaagctttctgatgtccaatcctgggtctcagcctcatggccgataatgtacgctggtgtgcagcttcattattcacaaagcagcttaaaaggggcagactttattattcccattttcacagacaagtaaactgggatttggagaggctatgtgatttggccagggccacactgcaaaccacaaacagccctaggtcttccaactcctggcccggccctccttgcttccctctatggcgcttccagagaaaacaatgataaaactaaaaaggccaatggagttgtttgactctaaaagcacaacctcagccaggcacggtggctcacacctgtaatcccagcactttggaaggctgaggcggtggattgcctgaggtcaggagttcgaaaccagcccagccaacatgctgaaacctgtctctccaaaaaatacaaaaattagttgggcgtggtggccggtgcctgtagtcccagctactcaggaggctgaggcaggagaattgcttgaatctgggaggcggaggttgcagtgagccgagatcacaccattgcatctctactaaaaatacaaaaattagccgggcgtggtggccggtgcctgtagtcccagctactcgggaggctgaggcaggagaattgcttgaatccaggaggcagaggttgcagtgagccgagatcacaccactgcgctccagcctgggtgacagagcaagactccgtctcaaaataaataaacattaaataaaataaaagcacaacatcgccctcaattttctcaacattccctgtcttcatggcttttctagtgtttcatagtgaatgtgcctaacacagaagggttcctttccacagtgtggggggagcttcggacatctgcactccagagctactatttcaatggaaaacaatcgtcttgatccagtttgcaccccatcctttgatttgatcagttcacctaaatgccaacccctggttccttaccaaatactagtctaagttgcagcgaagtggaatgtcccagcaggcctgacagctgtacattatgaagcttgtatatccacggtgcaccactgcacatgtagaggggatctagcttagcacatggtttgggggatcgcttctctaaaaggtgtttcaaagttaggcctttgctgagttctttgcaacagaggtcactgaaaatattggaccaaatgtaggtttccactgtcatgttcctttgcccatgccaaatggacacacgcacagcttaatctggcctgatactacttttatgtgatacaggctgagcaggttcactgcaggcgttgggcatttgctctgagggacagggtggtgggttactgcagatggccaggaggtttgcaggtagggatgaatagaggtgtttgtcaggaagtgaaggcttggggggccaagatcaaagatattgaatgtagaatgcagaggggagcctgtcaggagctgatggttaggaagttacagaacgttctgccacgcccttataaatctgcctgtcacacttctttctccctgaaagtacaacacaagaaaacatacacccgaaggtcagggaagttgggtgtcaaggtggacttcacgttgactgttatgaaggtcatgaagactaatgaaatctatgtgctcctgttgactggaaatgctctgcagcttggcgggaggtatatgtagtgcttcccactgctagtgaatactcactctcaagggggtttcttcaggtggttttggtaaccagaggacatttgcatccatgctgcctgaaagaatatgggtgctaggtgaatcagaacagtcttggcacggaaactcgtttgcttgcaagacataaagtgaggagaatatttccacgtaacatgtgacttctttgatcatagagccccacccatccacccccactttttttaagccaaaaaagaaggacccatgatttgacaagcattggcataataaggaaagatagggtaggctatttaaaatcagaacttctgaaagtccatgaggcctagccactgaacttgtaatatcacattaaaatgcgctaatggagagatgtggaatattagcaggaatctgttgtaattagtactggcatgcttaaccaaagcagttccaccacaaaccagacaaacgctgttttgctaatgcagacagagaagggagtttggaaaatgctggagagctcagtacatccaccccacggaggatgaagctgggtaatgggggacctgccccgaaaatcacgtaggttcttttctattttcctaagtgtcggccagcttgagaaataaaaggacagagtacaaaagagagaaattttaaagctgggcgtccgggggagacatcacacgttggtaggatccgtgatgccccacacgccacaaaaaccagcaagtttttattagggattttcaaaaggggagggactgtgcgaataggtgtgggtgacagacatcaagtacttaacagggtaatagaatatcacaagacaagtggaggcagggcgagatcacaggaccacaggaccgaggcaaaattaaaattgctaatgaagtttcgggcactattgtcattgataacatcttatcaggagacagggttttgagatcaaccggtctgaccaaaatttattaggtgggaatttcctcttcctaataagcctgggagcgctatgggagactggagtctatctcaccgctgcaatctcgaccataagagacaggtacgccccagaggggccagttcagagacctacccccctaggtgcacgttctctttctcaggaacgttccatgctgagaaaaagaattcagcgatatttctcccatttgcttttgaaagaagataaatatggctctgttccgcccggctcacctgcggtcagagtttaaggttatctctcttactctctgaacaattgctgttatcctgttcttttttcaaggtgcccacatttcatattgctcaaacacacatgctatacaatttgtgcagttaatgcaattattacagggtcctgaggcgacatacatccttctcggctgacaggattaagagattaaagcaaagacaggcataggaaatcacaagggtattgattggggaagtgataagtgtccatgaaatcttcacaacttacgtttagagattgcagtaaagacaggcataagaaattacaaaagtattaatttggggaagtaataaatgtccataaaatcttcacaatccacgttcttctgtcatggcttcagccggtccctctgtttggggtccctgacttcctgcaacagctggggccctgtgcccatgccctggatgtttatactcctccgagcgaaggcagctgcctgactccatatgtggaagaggaagctgggcagggacgagcactgtctttatacatggtctggacatgtggaaagctggccaagaagaggatggagccaacacaggatggagactgagcttttgggagatacagaggcaaggaaagcatgttggtagctgtgggggctattggttgcaggcttggcttcaatgcttgggctctagtgcctgacattgccatgcagacttcccagtcgtgtccgcactcagctcaacacgcctcacttgtgccctgttacctggattcacagggactaagccagtcttgcctgatcatacctgcaactagattttggcttaatcctttgtgatgtggacccacaaaccaagacattgtaactgatgtcacaatgtcagttttgcatcgatggggctacatatgctagatttttcttttttaaaaataaattttttgagacagggtcttgctctgtcacccaggctagagtgctgtggtgtgaccattgctcactgcagccttgacctcctgggctcaagtgatcctcccacttcagcctcctgagtagctgggaccacaggcatgcaccaccatgcctagctaattttttattttttgtagagatggagttttgccatgccgctcatgctcgtctcctggggtcaagtgacctgcctgcctcggcctcccaaagtgctgagattaaaggcgtgagccaccgtgcttggccatacaccagattctgggggagagtgagtatcaatgtcagccagccttagccagtactgcattacagtttgaaagatgactttatgataaagatcttagatgtgggttgactggaatccagaccactggactgaagttccctgagggcaggttctgagtctcagctatctttgcatgctagccagagcatagaaactttgctatgtgttttaaatacgtgttttgcatgaacaaatgaagtctctcttaatctgaattaaaaagatatatatatataccttactaggcatatctggaaagtgaatatctttatattaaatatgcatcaaatttggtgtttctaaaaagttgtttgtggttcaagttagggagaaggcagaaagcctttccatttaaaatttataatgccaaatctttaaaaagattgtagccacagtggaacagggctctttccaaaagatcttcattccactgtactttttttttttctttttggggtggaaccttgctctgtcacccaggttggagcacagttgtgcaatctcggctcactgctatctctgcctcccaggttcaagtgattctccttcctcagcctcccaactagctgggattacaggcatgcaccatcacgcccagctaattttgtatttttagtagaggcaggattttgccgtgttggccaggctggtctcaaactcctgacctcaggtgatctgcctgcctcagcctcccaaagtgctggaattacaggcatgagccatcatgctcggccattccactgtattttgatttcttaagtggtatactttgaatgttacttgatccttttttgataactcaaagtcactgttacaagcattaattgctataaaattatgactttagagcctacgactgcagctgtcaaactttttgaccctaatttaccttaagaaatgaattttacagtgcaacctagtattgcagatatgtagatgagacacaagttcccaaagataatacttatcttcactacctaaaaagcactgtgatctcttgtcttctgttgtttaaaatgttggtcaggattcactaaaccatgatgattgccccatcatcatgggtggtgcctatggtttgcaaacactgagaaagaatgcaaggactttcagcttccccgctttctggcttttacctgtattttcctgcagtctggtgtcacttctttttatgtgaaggcctgcccccacaatcctccttagagttctaatttcctgaacttggaaatcagaccatcaagtttgctggtattatgtataaactgagagtaaactgtttctcaatgacagcctgaaggtgccctggaccatggcgtggagctgaggagcagcgactcagagcccctccgagccgctctgagctcctggctgggttcccatgcagcttcactcaatggcagagctcatgatactgagatattatggaatgcactacctgtaaacacctgcatgtgcacacgatgttttcttttgtgaaaggaatattccaatgactggggctggtggtgctagaaaatgacaaggggggctgggcgcggtggctcatgtctgtaatcccaacactttgggaggccaaggcaggcggatcacctgaggccaggagttcgataccagcctggccgacatggtgaaaccccatctctactaaaaatacaaaaaattagccaggcgtggtggcatgctcctgttgtcccagctacttaggaggctgaggcaggagaattgcttgaacctgggaggcagaggttgcagtgagctgagattgcaccaccatgcactccagcctgggtgacagggcaagactctgtctcaaaaaaaaaaaaaaaaaaaaaaaaagacaaggtctcctggcagcaatgttgctccatgaatgaccatatctgagcccctgtgtatgaggaggttattcctaaagtaatttactgcctcaggcagtttgcaacgatgtgataccttggctttctaccctgagctgcctttgctctattattattattatttttgagatagggtctggctctatcacccaggctgcagtgtagtggtgcatcttggcttactgcaacctccacctcctgggctcaagtgatcctcccaccccagcctccccagtagctgcgactacaggcgcacactaccgcgcctgcctaatttttgcattttttgtagagatggggtttcaccatgttgtgcaggctgctctcgaactcctgagttcaagtgatctgcctgccttcgtctcccaaagtgctgggattataggtgttagctactgcggccggcccctgtgccttattatttatagctcctcctagtgtacactttaactgtcatggatctttccacttaaatgcaaacaaagacaaacattaatatatgaaattgcaaaaagtgtgtcaagtttgtgtgtgtagatatcttatattggtttctaaaaattacagcaaaaggggtagatactgtacccctagacaacctaaatcacaagcaatcaggcactagttaaataaattattggcacatccattcaatggaatgctggagatgcataaaaatgatgatgcagatctatatttactaaaatgtatccatgataattttagatgaaaaaaagcatgtttcaaagcaatgtctataataagattctacttttattttaaaaatataaaatatatgcatgtagatacatatgtacaacacacagacaaacacatacacatagaaaaaagattggaaagttttacatggaaatacttattttcttattttacttgtttagacttttctgaaatattggcagtttttgcagtgcattccttttataataagaacaaaggcaattttaactttgaaaaaaataaaactatattattatgcaaaacagcacctctgtttggagcaccactcctatttgcaccccatcccatcctcaagtcaaactttcagaagagttctactcatacaaaaaaagggtaagttaaatctttattggataattcttacattaatgcattttatttttttagagacagggtctcgctctgtaacccaggctggactgcagtggtgtgatcacagctcattgtagcctcaaactcctgggctcaagtgatcctcctgcctcagcctcctgaatagctgggaatacaagcatgagccacggtgcccaactcattaattcattttaaagcaaaccactggcttatggttttacttttaacgtcatgttctcttccctgatggaattatggaggtggaaactcaagcagacgtgtttgctagttacttccttggcagcagcaggctatgggcctctccagccttggagaagacaagttgaaaagctcacatgacctatattctgatgctagttttcctaagccagagtcaattcaagtgtaaaacaatgttagtttaaagatgggaatgatccctaactcttgctagtgcttttctctttacaaagttcatttgcatccgtggcataactggtatctcacagaaaactgactagggagggagggcgagcagaagcatcattctcagttcacagatgaggaatctaaggtggggcaacttgccaaggccaccctatggggactggtacagacgggatccaaacctagttttcctgggtttgttctctttattctgtgccattgcattctttctagaaatacagaaatcatataatttatcatcccaactagacagctttgaaagtaaaagggggtgctaaatggatgggctccagggcaagaggtataaattgtgactctcccaggcaaattaggacttctggtcactttagatataacccagccccttacacacacacagacccacaacacacacacacacacacagacacacatacacacacacacagggcgaatcacatcttttaaataggaaagagaaatgcagcagggtaacaatgcctataaagtgctagagtattaaaaaataaaaataaataagtaaataaaaagtacttgaggcctggcgtggtggctcatgcctgtaatcccagcacgttgggagaccaaggcaggcggatcacccgaggtctgcagtttaagaccagcctgaccaacacggagaaaccccgtctctactaaaaatacaaaaaaattgccgccgggcgcagtggctcatgcctgtaatcccagcactttgggaggccgaggcaggcaggtcaaaaggtcaggagatcgagaccatcctgactaacagtgaaaccccgtctctactaaaaatacaaaaaattagcaaggcgtggcggcgtgcgcctgtagtcccagccacttgggaggctgaggcaggagaatggcgtgaacctaggaggcggagcttgcagtgagcccagatcttgccactgcactccagcctgggcaacagagcaagactccgtctcaaaaacaaacaaacaaacaaacaaaaaacccccaaaaaattagctgggcgtggtggcaggtgcctgtaatcccagctactcaggaggctgcagaagggagaatcgcttgaacccaggaggcagaggttgcggtgagccgagatcccgtcattccactccagcatgggcaagaagagcgaaactccgtctcaaaaaaaaaaaaaaagcacttaagtataacttgtattttattgtttgtggaagttagtctaggctttacatttccaggtcatcagcttgcaggcagtaagaatacaaagtctagattgggcaactggtattaatcaaagtgagccacattccaaatgtggccagtttaagtttttctgttatccatatttggtccaacattctgaacacaaaaaatgggttttattgttgaaacttgtgacttagtataatcactgctagaaacaggctttttactggtgcaattaacggtattcaaggtatgtagcctggccaaaaccctgagagacactacccacccttgtataaacaggtattagaatccagccaggcctgtcccttcagggatggtgctctgggctgccctgtgtccagccaccaaatctggatggtttatgaggggatgatgctgctttgggaaaacagtgtaacagtgtcccctctctagaggattcttgtagttgcctagggcgaacctttcgtgtcaggtgtggttggaaaacctcaaaggagagagggctgggcctttgtcaagcttcccaaacaagctgaatcaactgttttgtttctacttgtcaataaacgtttgtttgataaatgcctgcatctgtggcagaattcagtctcatacccacattcattcacatggtattcacaactgcaaggttgtgcgggagaagctgaccctcaccacatctatcttttacaaccttttacgctggcaactgtgtcctaccagagagaacccaagaggcctatgtggccaaaccactttaggttggtccacaacaaacatgccacttggtgaatctgaaatgggtagacttcaggaagggatcccttagtacattttcctcatcaccagattttgagcctcaggaaagcagagacggggtctgtcttgttcactactataagcctcatgaagtgcctgcccacaggaaatgtgtaatttacatttgtcaaatgaataaaataagaaagaattttgtcatttctagatctggcttattaactgtaatctgtgattgttctttattctgctaatgagaactgatctgcacagatcacaacctgttctttgccctgattaagttagtacttcaaaaagcaacaaataacaggctaatagtaaaaaccactgggatgatactgtttaattcacacaataatgcaatgagattggtatcatcacccccatgtttggatgaggaaaccaatgtccagagaggttttatctcttttttttttttttttttttttttttttagacagagtcttgctctgttgcccaggctggagtgcagtggtacgatctgagcttgttgcaacctctactcactgcaacctcccgcctcctgggttcaagtgattcttgtgcctcagcctcccaagtagctgggactacaggcatgtgccatcacacccggctaatttttgtatttttagtagagatggcgtttcactatgttggccaggctggtctcaaactcctaacctcaggtgatctgccccccttggcctcccaaagtgctggtacagtggcattagccaagttagtaaagccaagacttgcactcagttctgtcagactccaaacccaagcacactctcctgtgctgtgctacccagaattagcaataactcagttttgtagagattattttttattttatttatttatttatttatttattttgagacggagtcttgccttgtcacccaggctggagtgcaatggtatgatcttggctcactgcaacctcctcctcctgggttcaaacaattctcctgcctcagtctcccaagtagctgggatttacaggtgcgtgcctccacgcctgcctaattattgtatttttagtagtaatggggtttcaccatgttggccaggctagtcttgaactcccaacctcaggtgaaccacctgccttggcctcccaaagtgctgggactacaggtgtgagccaccatgcccggccgagtattttttattacttttactctattcactttctgctgcgctattgaacacatgcatctttttggcacttcatcttattttatcaaaagctttttttgggggaaaaactagatggatgttggaatatataagcctgccttccggttcttttacttttaattattttgattgacatatggccttgagggatgtctaagggcctctcctatctttgagctgcagaaggatccgtccccaggaatctgtcgcagctctccctgtctccagggcaccactccgacaccctccccccatgcacccctgccacttgccacactagacaactgagagccttttgtttcacgcctctgtggcttggtgcacagtgttctttctctggaatcctggtccactcgtttgttcttcaccttggttaactccttgttttctttcaggatctagctcaaacattagcgcatttgggacacttaggagattccctgctatcctgaacctctgccaggtctcacctgaagccctttctctctgctctctggacccactgagcacacctccaccttagcacctggcacgtggctccgtagtaacagatagatttgccacccttcttcgcatataaagagcccaagtcaggaactttttcttagtactggtacatagcaggcactccaagtgtgttagataataaatgaataaatcaggaaataattagccaatccacagtaaagcaagagagaaatgcagggatcagtgggcagcagtctgcagtggtctgagagctagctaaactgaattatttctcttagccactgtgcttattttttaactttaagagcatcatagttgtttttgttttttgtttttgtttttgtctttttttttttgagatggagtatcgccctgtcgcccaggctggagtgcagtggcactatctcagcccactgcaacctctgcctcccgggttcaagtgattctcctgcctcagcctctggagtagctgggattacaggcgtgcatcaccatgcccagctaatttttttgtatttttagtagagatggggtttcaccatgttggccaggctggtcttggactcctgacttcaagtgatccgcctgccttggcctcccaaagtgctgggattacatagttggtttttatgagacaacagaccatttaattctgagtgttctgctcctttgcctgttacagcaaaaaacaccaccaccaccaccaccaaaaaaaacaaaaacaaaaacaaaaacaacaaacctctggaaagatattcctttgtggccagttctccatcactatgccagccaccagcatcccctctggggactggggtgatctgatagcgcccaaggacaggctgcactcaccaactctgtggcttctaggtccccgatgtagaccaacaaatgacctgagcagagctatagctcgatccaactgtgggactctggcctaatgaaaaacaattcccagcatagcctgaccccttcaaaatgcagataaaaataatttagtgatttcctcccactaaactcttgggcatcaaccaagaaatctgcagtgtggctgctctgatgccattgtacaatggcaaatagttaggttttctttgtgcttttatcagtgcttattagcaggaacacacctggcattttaagagggttaattctccgttgggtggaattgttccatgcaatgcacagcatttagcacttctactccgatggatgccagttaccacaacagcccccaaatgaacattttccaaacatctctagtggtaagagccatcaggaatactgggcttcctggtggagttagatttgattaattttgcagcatcttagaagaaatggaagaggccacccaacccaggcggtgggttgaattctaaagggacaaggtccagggagttagacagcacacatgaagcaatgagccagttggaccaaggcttgtttgtgggaagaagtggaggtcctgagagcagagaaggtgcactggttccttgaatgaagaagtcaaggcagcgaggaagatgggctcacggaaccaagagatctgagcttgggtagaggtcaaaatggtacaaaaaagatgaagaatgagtgggggatggaggaaggctgggctatgggctgaaccctggctgcagtctgagcctcctcctcacagcctttggtatgcagggcataccaaagaagccaagaaagtcatcgattctggacagctccaacagcttaaagtttctagttaggaactagctgtcttctcttgcttggccttaaaagagcaacaacacagcaacaaccctatcaccactgtggtcacaccctgcgaacatgacctcctgcagagaacttctatgtttcccaaagtgacctaaaagggcatttgtatcccaaagggggagaggctctaaaacaagcccaggagaaaaatccactgaagtgctgagtacagggcatgagtacagaaatcattgcccatcactctgatttaatggctagaagctcaacagctctaacaggagagcaatgggcaaagttgcagtgaagctacttattcctgtgtctcatctttctcacttattttaaatttattttatcttgttctgttgtttgcaactttataagtggccttaaatccttttgcaacaaagatgggtataaataaataaagcaaagaaataaaatacgtggctgctgttgtcagcactgccagactgggcgcgaagtgttttatctctgatctaagaggaaggacgtgctctgctgaagtgagaagggaggaagaaggaggagaaaactccacagtgtcgtggagaacagttggctgtggacccagaggcctgcgtactgttccgtgtctgcatcaaagaatcacagaacctcatgcaagttactaacctctcgggcctcagtgtccctacctttaaaatgaaggattatattgaatgatttcaatggtccccttatttccaagcactgtgattctgtgaggcacccacatttggctcttgttcctcttcctctcttcctcaataaaacagcctctccaagttgagtgggccagtaagggctccttctaaaggagtttctaggggtgaagacaaatataagtcagatgagtcatccaaagaaatatttttgccccattaaaataaattggagcgcaacttatttgggaatgtaggaaactaagatttcattggataattaactgatcaattttcccactgtgaaatgggttaaaaatgttggcttttatctctattcactgatgaggtgttaagttccttcctttcaaataagttctgttatagaaagtagttatcatctgtttgtataatatcttaagactgctgtaccattcattagtaacaatcaaaagaatattattagcatatgtccaagaaatggaaggcattgctaatattctgggacattcttcttttgctttccatttaagattttagacttgttttggtgtacatagtctcacaaaaccatagtcacgcgccctatttgtatacagaatgtcttaggacaaatgttgcttttagcagacccaattcagaacatcagagagtagtgccctagagcagtggttctcaaacatcaatgactccagtctcttgttaaaatgcagatccttattctgtaggtcaatgtattttaatcatgccttttaaaattttttcttatttctggccgggcgtattggctcatacctgtaatcccagcactttgggaggcaaggtgggtggatcacctgaggtcaggagttagagaccaggctggccaacatggtgaaaccttgtctctactaaaaatacaaaaaattagatgggcatggtggcgggcgcctataatcccagctacttgggaggctgaggcaggagaattgcttgaacccaggaagcggaggttgcagtgagccgagatagtgccactgcactccagcatgggcaacaagagtgaaactctgtctcacaaaaaaaagaattttttttctatatttccagtgctttgacttcgtagggccttgcttaacctggggagactgctcttctcagggccagccaattcctagagatagtaaaggacgcacctacaaggaggagtatatatgcagaccaaccaacccgaagcccacaccccaaccacctcttttgtctggctcttacaatccagaccactagaccccttccctaatcaccccagggttaggtaccagacaactaaagacaggctctctaccctagagcctgctgagattattcaaactagccaatcctgaactgggttactctgcctagccaattctttctggtggaaatcaccagaaaggcttgcctacattttctctcattccctgtgcctcctaagcactcctggtgcttcctcatgtggctctgaggtgtggtgtgcccccttctcttgggaagtgtgaataatgaactatcatttcaatggcagccatctcctgatcttctggtttccccatacccaaataataataaagcttgctttgctttttttttttttgatacagagtctcattctgttgcacagactggagtgcagtggtgcaattatagttcactgcagccttcatctcctgggctcaagtgatcctcccacctcagcctcctgagtagctgggactacaggtgtttgtcaccacacctggctaatttttcttttgtagaggcagggctggtcttgaactcctggactcaagtgatccttctgccttggcctcccaatgtgttgggattactggcatgagccactgtgcctggtcaaagtttgcatcttaaaacaaccagggatgatatattagtccattctcacactgctatcaagctctacctgaaactgggtaatttatgaagaaaagaggtttaattgactcacagttccacaggcttaacaggaagcatgactgggaggcctcaggaaacttacaatcatggtagaaggtgaaggggaagcaagcacgtcttactatggaggagcaggagagagaaacagtgaagagggaggtgccatgcacttttttttttttttttttttttttgagatggagtctcactctgtcactcaggctgcagtgcagtggcgtgatctcagctcactgcaagctccgcctcccaggttcatgccattctcctgcctcagcctcctgagtagctgggactacaggcacctgccaccacgtctggctaattttttttgtatttttttagtagagatgtggtttcactgtgttagccaggatggtctcgatctcctgacctcgtgatccacccacctcggcctcccaaagtgctgggattgcaggcatgagccaccacacttttaaaccatctttttggtttaaacacttttaaaccatctggccagtgccacacacttttaaagcatcagatcttgtgagaactcactcactatcacaagaacagtgtattagtccattttcatgctgctgataaagacatacccgagactgggcaatttacaaaagaaagaggtttaatggtcttacagttccacatggctggagaaggcaaggaggagcaagtcacgtcttacatggatggcagcaggcaaagagagagaatgagagccaagcaaagggggaacccatataaaaccatcagatctcatgagaatttattcactatcacgagaacagcatgggggaaaccgcccccatgattgaattatctccaactggtcctgcccttgacatgtggggattattacaattcaaggtgagatttgggtggggacacagagccaaaccattatcaaacagcaaggggaaacccatccccatgatccaatgacctcccactaggcccctcctccaattcaacatgagatttggatggggacacaaatccaaagcatatcatctgtccctggcccctcccaaatctcatgtccttctcacactgcaaaatacaattatcccttctcaacagtttcccagtcttaactcatttcagccattaactcaaaagtccacagtccaaaagtctcatctgagacaaggtaagtcccttttacctgtgagtctgtaaaatcagaaacaagttagttacttccaagatacattgggggtacaggcattgggtaaatgttcttgctctaaatgggagaaattggccaaaacaaaggggcaacaggccccatgcaagtttgaaacctagtagggcagtcattaaatcttaaagctccaaaataatcccctttgactccatgtctcacatccaggcaacactgacataagcaatggggtcctaagggcttgggcagctctgccctggtgactctgcagggtacaacccctacggctactttcatggtgttgagtgcctgtggcacttccaggcgcatggtgcaagatgttggtctatctaccattctggggtggggaacagtggccctcttctcacagctccactaggcaatgccccagtgcggactttgtgtggggcttccaaccccacatttcacctctgcactgccctagtagaggttctccttgagggctccgcccctgcagcagacttctgcctagacatccaggcattttccatacatcttctgaaatctaggtggaggttcccaaacttcaactcttgccttctgtgcaaatgcaggcccaacgtcatgtggaagctgctgaggtttggggcttgcaccctttgaggtttggggcttgcaccctttgaagccactgcctgaggtgtaccttggccccttttagctgtggctggagctggagcggctaggatgcagggcacagtgtcccaaggctgcacagggcagctggactctgagcctggcccacaaaaccattttttcctcctaggcctctgggcctgtgatgggaggggctgctgtgaaggtctctggaatgccctggagacattttgcccattgtcttggctattaacattcagctcctctttaattatgcaaatttctgcagcaggcttgaatttctccccagaaaaatggctttttcttttctaccacatggctggcctgcaaattttccaaacttttatgctctgcttcccttttaaatacaagttccagtttcagaaaatctctttgttcagcacatgagcatatacttttagaaacaaccaggtcacatcttgaatactttgctgcttagaaatttcttctgccagataccctaaatcatctctctcaagttcaaagttccacagatccctagggcaggggggaaatgctgccagtctctttgctaaagcatagcaagagtcacctttgctccactttccaagaagttcctcattcccatctgagacctcagcctggacttcattgtcaacatcactatcagcattttggtcaaaaaccattcaacaagtctctaggaagttccagactgtcccacatcttcttgtcttcttctgagccctccaaactgttccaacctctgcctgttatccagttccaaagtcgcttccacattttcaggtatctttatagcagtgtttcactcctggtagcaattttctgtattagcccattctcatactgctataaagcactacctgagactgggtaatttatgaagaaaagaggtttaattgactcacagttctgtaggctaaacaggaagcgtgactgggaggcctcagaaaatttataatcatggcagaaggcaaaggggaagcaagcacatcttaccgtggcagagcaggagagagagtgatgggggaagtgctagacacttctaaatcatcagatcttgtgagaactcacttgctatcacgagaatagcaagggggaaattcacccccatgatccaatcacctcccaccaagcccctcctccaatttgacatgagattttggtgaggacacatatccaaaccatatcagatggggcctggtgatgatgatgcagctgatcagagaaccacacttggtgtagccagcctctaaattctgatgctgttacagaatagggtgccaccatggctggggtctgacgggaatggctgtgttatatgtgtctggcctgtgccagagcccaatgcgttgcaggaataatgtgggtggagtggcccaggctactgcagagagggccctgaggataactgtcaggtttctgtcttactttccaaacgatgtgggtctgtggagctttactagatagacattaaataaaaagctgcagggaaaagaaagcagggcctgaggcccttaaactatagcaggcacagtggcaataagggtgactcaaggcccaaaggggaaaggttaggactccgcaggttggctggctcagggcacccatggcatgctgccaacctgagccatgtcagacatggggcctggatgacacacatgcaccctcaagaaaccccagtcaggaggcctcagagggcctccagggtaagccttaaagatccatgcaattttctggtaccccacagcaagaagctacccagatgcccattagcccttctgcccagaggtacatgagggctctgagcacctcactctctctcagacgacccagggatttgagaactgacctagacaggatctcaaaacttctgactgcaaggccagagcacttttctccactccaggacatcgtggttccatgtgttgctaataaaagcaaaccctgattaagaactatccatttgaaatacttcacatagcttagctcatctaatctccacaactctatatagtagctgctctttaaatccttattttcaagatgagtaagcaagcctagagaggctaagtagcttgcccaagccacccactaattggcagggtcagaatttcaatccaaatgctatacaactgaaccttcattctcgattgccacccctgcaggacacactagggcagtgttattccagatggagcccacagctctggatcggaggcatcagtgcctctggcaggaaatgccccaccctcctgaccagctgaatgggaatctcaggggtgggtccaggaatctgtgctttacaagctccttggatgagtttgctatatgctgaatatacctatactagagacatccctgagggaagcttatttcccaggccaggccaacaataataagaccatattactatagtaatattataatacatattacagttttgagtcagaagttttgagatcctgtccaggtcagttcttgaatgcctgggtcccctgagggacagggaggtactcagagctctcatatacctctgggcagaagagctaatggcatctggatagcttcttctgtttttgtttttgtttttgtttttgagacagtctcgctctgtcgcccacgctggagtgcagtggcaccatctcggctcactgcaatctctgcctcctggattcaagcaattctcgtgcctcagccttctgagtagctgggattacaggtgcccaccagcaaacacagctactttttgtatttttagtagagacgggggtttccaccatgttggccaggctgatcttgaactcctgacctcaggtgatctgcctgcctcagccccactggataacttcttgctgtggggcaccagtaaattgcatggatcctaagggttaccctagaagccctctgagacctcctgactgggtttcttgagggtgcgtgtgtggtgtctaggatccaaggctgtccatgtcacccatgggtcctggatgccacacaggacaggtcttcttacaatagtagtaagaccataagtgtaacttgaagtatagacttcactgcttagcataaaccctgggaggcagcttggtatatcagaaagagatcacgtgtgggctcaaaaccagctccagcagaaggtacaagcttggaaactttgggcaaagaacttaacttctctgagcctcaccttcctcatgtggagaatggaagtatactatcttactcccagagttcacgtgggcatcaagtgagataactaggtaaagtgctgtgctccatatctagcacccaggaaagactctgtaaatagcagcctcggtacttcctcagagcttccctgttttctaaaattcatgtcctttcctagcatcctttacaacagcatgaatcttgaattcctttggctgccaagccaagggaatagctttcaaaaagaaagaggcagctaccctcctggataactggagtagtatgctatctaaacaatgcctaaaggcatttctgtagatagtcacttggagcacatgctcaaatgtcatcaaactgtgggtaggggtgctcactcagggaccaaggaaattcacatttaagcaatggttttgttctcatctctgtgactcaactatacctggtaaaactgtgactagtggcatgtcattaaaagtgtatccccactgcaaaccccagaggtggagaaatgacagtggtggtgaaaaactggctgcaagcacagaccaaattctgcagtgacatttcagtcctttgagtcaaaccaatcctccatttctgggcatatggataccttggaggaagcagttcttcacatttgctgtgactggagcgtcctaattggcaccagcaggcttcaggtataggcaaagaaaaggaacccctaccctccaaaaaaagctggggtggaggcgggggggatgggaagagaaaaaagagatggtgttggagaagaaggagcttcagggggcatttatgtcattattacttaagtcatctgaggccacatctgtcctaagccattattagtctgtttttcaatctggaggagaaggtacaagtagaatttaagggatatttttccaaagatgaagaaaaaagtcatactacatacttcattatataaattcattatatacttattatatatttcattatataaatgaaaatcccactaggagatgtcagtagttactcttcatatctgtaatatgaaatttcaataaaagggtgcaggtggcaaaatagaaacctgagcagacctcatcttctcattcttcccgcagcgtttggagacctctgcaaagacagactattttatatgggggcccagttgttttctgatctttttagatgctggcccagaaaaacaaaaccaaaccaaacaaaagtgagttctcttgtaccttaactctggccctgtggttctctgttttttaaaattacaaaaaggtccaggtgtggtggctcaggctcataatcccagcactttgggagacctaggtgggcagatggcttgagtccaggagttccagaccagcctgggcaacatggcgaaaacctatctctgcacacacacacacacacacacacacacacacacacacacacacacacacacacacagtacaaaaattagccaggtatggtggcatgcacctgtagtcccagctacttgagggggtgaggcaggaggatcagttgagcccaggaagtcaaggttgcagtgagccatgatagcaccactgcactctagcttggataacaaatcaagaatctgtctcaaaaaaagtaaatgaaaaaaaaagaaaatttaaaaaatctaattattaaaatgataagtgtatgataaagattttagaaaattcagatatgaatgaggaagaaactaaaaatgacccacagtcaccataccatttcagtcaaaaatacacagatatgtacataattttttaaaaagtgatcatactaagcattgttttaaatgctgtttccccccacttttcacattataaacattttttcatgttataaatttatttatttttttgagatggggtctcgctctgtcgcccaggctggagtgcagtggcacaatatcagttcactgcaacctccacctcctgggttcaactgattctcctgcctcagcctcctgagtacgtgggattataggtggacgccaccacgcctggctaatttttgtatttttagtagagacggggttttgccatgttagtcaggctggtcttgaactcccgacctcgtgatctgcccacctcggcctctcaaagtgctgggattacagacatgagccactatgcctggcctaaaatattttttaaaagattattttagaggctactctgtagcctatattgtttgttattcatattggttgcaattttttgctattatggataattctggagtggatatcccttaaaggcatgcttgtacgcaatttgatttatttactttatataaattctgagaagcataaattttggttccaggtccttgatacatctagtcaaatgcccaacatgaagggagccccaatttacataaccagcagcttgacggaaagtctgctttgctttttcctcatgaccactgggtattacagtaatttctaaacacttgtcattttcataagtgaaaaatactatctgattgttgtaacttttgttcttaactgccagtgaggttgaacatttttcaggtgaaaatgtttcactcaaaattcaatgttttcacttgagtttcctccattttgcctgctcctacccattctctaattagtatattttttctcattaatctataagaatttttgtaatggtaagaatattaatatttttaaattagaagttgaaaactataactgtttcttaagacaactatgaaatagttaatatcatcaaaagcattaaaacgttcttttggtaaagcagaggaaatggaaggggcagtgaagagtaaattagataaaataattctgtgtcaaaacctctccccttttaaaacaacagcaacaataagaaaacaccacccatacaaatcatgatagagcggcaccttggatcgagtcctgtagctatgctagatagccccacaccttcccagttaatcagctataggatacctgagtggggaagaaagtgcacgtgggcactgtccaaccccagtggccacagggaaggcagggtattttgcagaattggagccagcaagtaagcagtccgaattccgagttcctgggtgccaactggagtgagctgagtgatcactaaaaaacaatataaatgggatccacttccaccttcaggatgggcaggattaaggcgtatttaaggaagccacaacacagcagtttgctctactcactgttccaaagaggcagggtcatatctaccttttggtgtgtgtgcctggaggctccggggagaggtggacacagataaccctgaaacctcccaggcagggaatcacctcttcacacacagtttgcatctctgcagttgacggcaggagcaaaaaatgtggccagccaggttggaagggtgacaactgatggaggcatggaaccaccttcggcttggggccaacccaggttactaatcacaggtcaggtattcaggtcagatgtccaccattcacacgggctctttgtctgccaaggcctgggtccaggctatgagtgttcaaaaatagaacaggaagttcagaaaaaagcagaagccaagagaaggttacagcatgggagggcaggcttgggagagaggatttatcttgtggggaggacctcccagtttaggagagaagcacctgctctaggcacaggaagacatcacaaacaggtgatgaacagcagccgggaagcaaggggcctgttgtgtttccatgttacatcctgattccaggatgagcaagactaggaaacagaccagtttacagtggccaccagcctcacagactgtacctattaaaatggaatgattcttctgtccttttgtgagcaggagccgaagaacaggtaaatgaagggaagcaaaggaaagagaaagaggcctggatgggtgaggggagcatttgtgatcttggcccactcagcgcccatcccccttcttctcttcttccagtaacagcaccttgattttcctcctgggagcaccctcctccacattcagtctgggaggctcccacagagtagcccccgccctacagggtctagttcaaggaccctcatgaagtcctctcaaggggatgtgggtagttgataaaatcattatcccagatatttgtgtaaggccttatagtgtaagggtttccttatagaaatttcctatttggggctttgggtctttctggcttcctaaattcatgtataaccttgtctcttggttcactgggttgagattccctagccccctgctgtgctaactgtaccccagggacatatcccacagcttcctcctaactgcagcaggagccagcgcagagaatgaggtcagggctcttggccttctcagagaagcggactaagcctaggaatgattagattttgctttggggaaatctgatacctattcaaatagggggtgtacctggagcccacagtggaaatgggaagggttaggatttggcagctccatcaacagaagacagataaaaactcaccacttacagaaaaagcaggggcaaaagcagtgagcgttccttttggagtagatttctgcttttcagcaagcgcagggaacagaaagatccagctgtgaaggggccagcgaatcatgcatttaaaagttgcaatgccagggcctaggaaaggaggcctctcttcagccgtgaccccactttggattcttccaaaacccaggtgatcatataatcctttaaacgtctctggcccctttaactaccaaagcccagtgacatcttaataagaagcctggtggcatagtcttggatctggagccaggagtgtgcttcttgcttctttaaatagtccgaataccatgtaggaagcctgaaatcttgatcttggtatagcccttgggtcagttacctctctggacagctttccctagtgcaggtggttaattctttcatatctgcagagtgcagacttgaacagacagaattaacactgcctcttgcctacagtgcttacgcctgtaatcccagcactttgggaggctgaggtgggtgaattgcctgaggtcagaagttcgagaccagtctggccaacatggtgaaaccccatctctactaaaaaaaaatacaaaacctgcctcttgcctaggttagtgctaggtaccgttcattcattcattcagagacagggtcttgctctgttgctcagacagcagtgcagtgttgtgatcacagctcacggcaacctctgcctcccaaactcaagtgatcctcccacctcagcctcccgagtagttgggactacaggcatgtgccaccatgcctggctaatttttaaaaaaattattgtagagatgagatctcattacattgcccaggctggctttactatttttggtagagacggggtctcaatatgttgcccaggctggtcttgaactcctaggctcagcgatcctccagcctcagcctcccaaaatgctgggattacaggcatgagccactgtgcctggctccttctctaccgcagaggagttggtggtgtcttctgggtatccactggaaaattccagggcactctacctgtccagcagagctgagcacaccttgggatgtgctcccaagggaagctctgcctccctccactcaggccaagctacttgctggacttcctgcctatggcctctccattctcttcagacctcgggctgtaggaagtttccctcagcaccacacatggcttcgctgccctgcctctaaccccacacaaattctagccaggagaccctgcacccaccccaacaggctgagcagcaacaaccacgaccacccaacaccaaatgttgctgccgggtgtgaagtggccggtccagaacacggggtccctgactggactcacagggccagggctgggaatcttccccgcacctctctcagctggcacaggagagagggcacacaagagagagcttcagggtgacagggcacagaagtcacccaaatctctgactctgttcatggccatcatggtttccagcttcccttgagggaggcagaaaaaggggagaaactgaaggcctgactcaaaaaataaagggttgggtgggggacaacggggtgcgaagcggagctgctggaaggattcctggaccattcagcacagcggccttggagcagctcatcactaatcacggtgttctgaggctccgaatgctctgcgcaggccagctggggcaccgctctgctgtgcctgcatcccgcccttacagatgctcacagccacgcctgaggctttgccacatgggaagtagtctcctcccagggctctggtcggggacaaggggacagtacgaggcttgcactaacttgggtgtcattcctttgtgacctcgttttgtaaaaatcgtgaacaccctagacctgagaggaggaccagcccagatgaaagcttggaagaattcccaggggctggtggcagtctcagcctggctgctctgcccagggacatggcccacagggctctgctttccctgctgccagctcctcagctggagacagcatggccagtggaggcctcctgtggctgcttctctcagaccaaactcctttgagaaattttgacatgaatgagaatagggtagcctaattgaaatacaatggggtcttcctcctaaattcccacctctaagctagttttctcttgggagggactagtgctctctttttaagaggggtgtgtgtgagtgagtgagtgagtgtgtgtatgcgcacacataggttaacagtttggttctaatttagttgcctgtcccaactgcattgtttactggtagtggtaactttacttcatcatataacctgctcttcacagtggcttcaaaatgcattgtaactcatcactggtactaccatgccctcagacatcatgaagacaggctgagggcagggctgggactatgtgtgtacacgtgcgtgcctgtgtgtgccctcacagttaaagtggggtccatattaagaagatacaaaggccgggcacagtggctcatgcctataattccagcactttggaggccaaggcaggcagatcacctgaggtcgggagttcaagaccagcctggccaacatgatgaaactctgtctgtactaaaaatacaaaaattagttgggcatggtagtacaggcctatagttccagctactcaaaaggctgaggcatgagaattgcttgaattgggaggcggaggttgcagtgagccaagattgtgccactgtactccagcctgggcaacagagtgagactctgccttaaaaaaaaaaaaaaaaaaaaaaaaaaaaaaaaaaaaaaggttgggctgtggcttacgcctgtaatcccagcactttgggaggctgaggtgggcgaattgcctgaggtcaggagttcgagaccaatctggccaacatggtgaaaccccatctctactaaaaaaaaatacaaaaaaattagctgggcgtggtggcatgtgcctgtaatccccactactcgggaggctgaggcagaggaattgctcgaaccagggaagtggaggttgcagtgagctgagattgcaccactgcattccagcctgggcgacagggtgagactccggctcaaagaaataaaataaaataaaataaaataataaaataagatacaagccaggtgtagtggtgtgcacctataattccagcaacttgggaggctgaggagggaggattgcttggagtcaagagtttaagaccagcctgggcaacatagcaagaccctattttaaaaaatgtacagcaccactgccagtttttagggagtgtggttctgggtctcgatgccctcactctttggatacatgacgtggggtgtatcatttcatactgaggtctctgcaaagcagaggggctaagagggctcggggttagacacacctgggtttgaatcctgattctgccactttctagctgttagtctttggtcaagttccttttctctgtatgcctcactttcctcatctacaaattggaaatattgagagttcctattgcaaagtattgctgtgatgactaaatatgtgaatacatatcaagcgctcagaaaacttcctggcacacagtatgtattcaataaatatttagtatttatattattcaacagatagcagctgttattattataaataaaaaagggtgggaagttggactgaatcacacttaggtcttttgcagctctaaaatcccacagttttatgatgttatggaagactcaacagatcctgaatggatcctttaaaaaacacactagccaaagggagagaggccacaaagaatttaagatgaggctgcccaccctgctcctggcccctgtatgtgcactttgtgtcaaagcccatgtgtttcaggttggcacacaccaagacagcaccacagccctgcagcctcttcccttgtgaaggcagcggagcgaggtcaaaaccctttttgttttgcctgtttgtggattctagctccatctcccaagctgctgctccattatgctgggctgtttaacagggccgccagggtcagggctagcaggcttcaagtgtccatgcggctgctgagacactctactggtacttgactttgctgcaaagtagggaggaaaaggagaagtgatgcttgctgaaaagtctggattttagaactgaaagacactgctcgatgtaggactaaaatccttctttgatgtaacgaggatatttgggtttaaagtctcctttttcaagaggaccaaaagatgaggtgtattagtttcctaggaccgctgtaacaaagtaccacaatttggggggcttacaacaacagaaatttagttttcatcattcaggaggccagactctgaaatcatggtgttggcaggattggttccttctgggggctctgagggagagcctcttggaattatttcctacgtggttggaagtttggatggatgtgtgaaagctgataattttctgtgctgctgtttaatcagaaatggaaattagggccgggcgcagtggttcacacctgtaatcctagcactttgggaggccaaggcaggcggatcacttgaggtcaggagtttgagaccagtctggccaacgtggcaaaaccccatctctactaaaaatacaaaaattagctgggtgtggtggtgcatgcctgtaatcccagctactcaggaggctggaacacgagaatcacttgaacccaggaagcagaggctgcagtaagctgagatcacgccattgcactccagcctggacgacagagcaagactctgtctcaaaaaaaaaaaaaaaaaaaaaaaaaaaaaaggaggccgggcgtggtggctcacgcctgcaatcccagcactatgggaggccgaggcgggcggatcacctgaggtctgcctctctcctcacttctgttgtcaccagtgatcttcactgttcttgggattgtggctatatcactgtcaatcttcggcttggtcttcacatggccttttcccctgtgtgtctctggttctaaaccttctcttattctcttttttccctctgtttttgttttttggacacaagatcttgctctgtcgcccaggctggagtgcagtgatgcaatcatagctcactgcagcctcaaactcctgagctcaagggatcctcccaccttaacctcctgagtagctgggattataaggcatgtatcactatgcctggctgacttcttttattggtgccctataaagattggtactacctgaattcagtacaacttcatctttacttaattacatatgcagaccctagttacaaataaagtcacatccacaggtagggagtgggtagaatttgagcctatctttttgggaagacacaatttaacccattgtgaccttgttaacagggcaaacaaggtccagaatacaaagctaaagagagaagaaagagagagtttactgtctggccactggtaaaacgaaagaaatcacctctgttatgagacaagctataaaacaataataggtggaagcaaccagaccccctccatctttgcactccccatgccggagccagttgtgacaaattacaggactgttgggggaataaaccattaatgattgatgttccaagaaaagctgcctcactaacctttagaaaaatctatttgaatccttccttacttcctcttcagatggtgtagtctacaacattccccagtgcatggattggcaggtagagctctctttgtgaggaatctgctctccaaatgggaagcacatacattgcgagcaactttaatttccatttcctttttttttttttttgagatggagtctcactctgtcatccaggctagagtgcagtggcgccatcttggctcactgcaacctccccctcccaagttcaagtgattctcgtgtttcagcctctagagtagctgagattacaggcattcaccacaacgcccagctaatttttgtatttttagtaaagatggggtttcaccaggttggccaggctggtctcgaactcccgacctcaggagatccgcccgccttggctttccatagtgttgggattacaggcgtgagccaccacgcatggcctccatttcttttttctttctttctttttttttttttttttgagacagagtcttgctccgtcgtccaggatggagtgcaatggcatgatctcagcttatgcagcctccgcctcctgggttcaagtgattcttgtgtcccagcctcctgagcagctgggattacaggcatgtaccaccacacccagctaatttttgtatttttagtagagatggggttttgccactttggccaggctggtctcaaactcctgacctcaagtgatccgcctgccttggcctcccaaagtgctaggattacaggtgtgaaccactgcgcccggccctaatttccatttctgattaaacagcagcacagtgaattataagctttcacacatccatccaaacttccaactatgtaggaaataattccaagagcacaaagaaggctctaggagcatacctctggcctgtggcaggacagaatccactgttcaccttattttaggatgcttaatgtatcccccatccctcaggcagcacagaagttaccttacatgtcccttagtgtgaacaaaccaaggctgagcagagagtctgaggtgatggctggcagaaccaggtgtggacaaattcaggaaagcagcgctgtcaccttcccctctgtctccttagtgctgggcttcatgcttggcacccaacacacactcagccaaatggcaaatgacaggtgagaaatacagcgttgacctctgcagatgcattttgggagtgtccagtatggcaaagggcatcctagtccagcccttaggagatgatcaatcatgtttgcccagtgaatgaactcatgagcttcctactcatcaggagcacatgagagaccaggaaggattctgccctgtgcctgccatcttggtcctcctgtgctgcagcatctcaggatcctatcaagcaaataaggagttcctgtagcttcatacagttgtggcagcatctactttagcatcactgactgaaagctgggtagaccattatagacactatccctcttctattaatttaacaattaacatttaaaaagcactggaaatcatcacagcatgaggttcttttaaataacagactaggtcttacctccgtattcactattctctagaaataaacattaagacaaattaaaaactagcaatctggttctcttctgtgtcccatgcagtcatataataaggaacaagattttttttccagggtgagtataccaatgggcaatttgacagtagttgttaaaactgaaatgtgtatatgacccagtcattcctgaataaacactatgcacaagagtgttcactagagcactgccaatattaacaggggggaaaatgtaaccaacactttcattctatggaatattactcacgaagcagacagtcacgcacaggcttgaaagatacctaagttgaatggtttggagaaaaacagagttgcagaacttatatatggtaccgtttatgttgaaaaacacacagcaggccaggcgtggtggctcatgcctgtaatcccagcagtttgggaggccgaggcgcgtggatcacgtgaggtcaggagttcaagaccagcccggccaacatggtgaaaccccacgtctactaacaatacaaaatttagccaggcacggtggcacgtgcctgtaataccagctacttgggaggctgaggcatgagaattgcttgaatcctggaggcagaggttgcagtgagcctagatagtgccattgcactccagcctgggcgacaagagtgaaacttcatctcaaaaaaaaaaaaaaagaaaagaaaaacatacaggaatactagatatttttccataggggtgtgtgtgtgtatgtgtgtatatatatatatatatatatatatatatatacacacacatacacacatatatatatgtatatatgaatataaaggcaatgttatatatatgaatataaatgttttccatatatatatatatgcaagaaaaatgtttggacagacacatcccagactaacaaccgtatgtatgtttagggtagggactgggcttgtagtagtattaagaaggactttatcttgtaataatgtattacttgtgtaatgtaaaaattatttttaaaaacccaagaacaattttaaaaagtatgactgtactactttgcttctcatggtagttgttctttgtgaatttattatctagctggagataaaatgttaaattaaaaggtatttccttagatcttaggaatgaatgcagacagtggcaagaaaatctaactgtattacaaacgtgtaaaaaaacttcactgaagagggttgagggaaaagtgctgacctaagtaactttgaaaatgagtagtccctaagactaaaggcaaaagtgaatataagcactgtcctctattcgataacattgtttcccatgggttataattctcatactgttattcatgcatattggaactgaacaattaagaaaatggatagcatatggtagatgctgggtttcttactgttgcagtagaaatttatagataagcaaagggaggggactagaatgatccatatggtaattggttagagtatgaactcatgcttaatatagatatagatgattacatatagaaatatttataggtatatgatacctatttatagctataaatacacagttagaagacacacacttattttcttgttctgccatctgagaaggcccagaagcagcaacactccagctgcaatgagcataactagtacccagatcttggtttctagtatcattctcctataaaaggtgccaggactccctggagaaatggctgattctggggcagaggcaggaaatatacaagatgagcctggggcatcttacagtaccagaaagtaaggcagtgctaaataaataataaaatcctacaaggataggtgtgtatcaaagggacacaagaaccacttgaaagagcttccagtggccaaaactggaggaatttgagaaacaaaataaagtagtattggattataacccaaagtacaaaataaagatctatgagtccatactgttataaatgcatgattgaataaataaatgggccacgcgtggtagctcacacctgtaatcccagcagtttgggaggccgagatggaaggattgcttgaacccaggagtttgagactagcctgggaaacacagtgagacccatctctacaaataataataattaataataattagctgggcatggtagcatgcacctgtagtcccagttactcaggagtctgagacaggaggttcacctgaggccaggaggtcgaggctacagtaagctgtgacagtgccaccacattccagcctgggtgacacaatgagactctgtatcaataataaatgaatgaatgaatgaatgaatgaataaataaataaataaataaataaataaataaatggaggagaagatacaaattttccttgcagaaaaattccaaataatatatacagacattccatccttaaggcatggaagcataaatccctacttctttttttttttttttttgaggcagagtcctgccctgttgcccaggctggaatgcagtggtgcaatctcagctcgccacaatctctgcctcctgggttcaagcgattctcctgccctagcctcccacgtagttaggattacagacctgtgccactacacccatctaatttttatatttttagtagagacagggtttcaccacattgctcaggctggtctggaactcttgaccccaggtgatccacctgccttggcctcccagagtgtggggattacaggcatgagccactgtgcctggcaccacttctttttttttttttttttctgagatggagtctcactctgtcgcccaggctggggtgcagtggtgcgatctctgctcactgcaagctctgcctcccgggttcacgccattctcctgcctcagcctcccgagtagctgggactacaggcgcctgccaccacgcccagctaattttttgtatttttagtagagatggggtttcaccgtgttagccaggatggtctcaatctcctgacctagtgatccgcccgtctcggcctcccaaagtgctgggattacaggcgtgagccaccactcccggcccctccccacttcttaagtgtgggttgtgcacagtgacttccttccagagagtacagcatggaaaaagcagggcaggagaggctgtgggagaagagtaatttcacagaggacaaacttgacaaatactgcctcaaacactacctcagtcaggtgatcaaggtcaacattaacagtgataaaccatgctgagagtacattacccttgatgtatgtgatgaaaatggcactttacctctgtggtctttacccccaaaacatataacccaagtctagtcattagaaaacacatcaggcaaatatcaacagaagggtatcctataataggcctgaccagaactcctcaaaactgtcaagtttatttaaaaaaaaaacaaggaaagcctgagagactggcacagctaagaggaggctaagggccaggcgtggtggctcacgcctgtaatcccagcactttgggaggccgaggcaagtggatcacatggtcaggagttcaagaccagcctggccaagatggtgaaatcccgtctctactaaatgtacaaaaaattagctgggcgtggtggcatgtgcctgtaatcccagctacccaggaggctgaggcaggagaatcacttgaacctggatggcagaggttgcagtgagctgagatcacaccagtgcactccagcctgggcaacagagtgagactccatctcgaaaaaaaaaagaaaaaaaaagaggcagctaaggagacatgacaactaaatgtaagttggtgccctagacgagatcctggaagagaaagctatcgtgcaaaactaaggaaatctgaataaactacggacttcggttaataataatgtgttaatattggttcaagaattgtagcagatgtaccacactaatgtaagacgttaattataggggaaaccaggtgcgggatatatatggcagctctctgtacaggtcgagaatccctaatcagaaaatccaaaatgcttccaaatctgcaactttctgagtgctgacatgatgccacagctgaaaaatttcacacctgacctcatgtgatgggtcacagtaaaaacacagctaaaactttgtttcatgcacgaaattatgaaaaatgttgtgtaaatgtaccttcaggctatgtgtattaggtgtatatgacacataaatgaattttgtgtctatccttgggtctcatccccaagacggctcattatgtacatatgcaaatattccaaagtcagaaagcatctgaaatccaaaacacttctggtcccaagcattctggataagagatattcaactggtattatcgtctcactttttctttaaatataaactgtcttaaaaaataaagtctctttaagaagaaaaggtgtacccttaacctacattacttcttactcctttttttttttttttttgagatggagtctcgctcctgttgcccaggctggagtgcaatggtgcgatctcagctcactgcaacctccgcgtcctgggttcaagcgattctcctgcctcagcctcccaggtagctgggattacatgcacccaccaccacgcccggctaatttttttattttttaagtagagatggggtttcaccactttggtggcgggtcttgaactcctgacctcaggtgatctgcccgcctccacctcccaaagtgctgggattataggcgtgagccactgcacctgggctttcttactccttaaaaagaaaagaaaagaaaagaaaagaaaagaaaagaaaagaaaagaaaagaaaagaaaacccagctgggtgcagtggctcaggcctgtaattccagcattttgggagcctgaggcaggtggatcacctgaggtcaggagtttgagaccagcctggccaatatggtgaaactccatctctactaaaaatacaaaaattagccgggcatggtagcgggcgcctgtaatcccagcttttcgggaggctgaggaaggagaatcgcttgaacccgggagtcggaggttgcagtgaactgagattgtgacactgtactccagcgtgggggacaaagtgaaactctgtctcaaaaaacaaaacaaaacaaaacaaaagccaaaataagctgggtgtgttggctcactcctgtaatcccaacactttgagaggccaaggtgggcagatcaccttaggtcaggggttcgagactagcctgaccaacatcgtgaaaccctgtctctactaaaaaatacaaaaaaattcgctgggcgtggtggtgcgtgcctgtagtcccatctactcaggatgctgaggcaggagcattgcttgaacctgggagaaagaggtggcagtgagctgatattgctcccctgtatcccagtctgggcgacaataaaagccaaaatctaaataaacctaagtacagattactaatgtatatgaattatggatttttttttcccttgggagaagttttaggactatgaggtcacaactacttcagatgatagtggaaataaattcatagtttgatttagcagcttgggaccatggacccccaaggcccctccagcacccagggacaactgctgagtatgcagttgttctgagtgggcattgtaggtcaataccaagcagcatggtgcctatgttggcaggggtgggatcaccatcaggtctgtgggtaacccttcaccacactagcagctaatttagatggcagcagtagctttggagatccatcactcttctgctcaaatccctttaatctcctgtagctgtctgcctcgtttacttccccctccagtcacgctgggctcatagctgttcctcaaacccaccaagcatgttcctgcctcagtgctgttgcacctgctgtttcttctgactggaatgttactcccctaaaaaacttcctgacttgtctcctcaattcttttgggtctctgctcaaatgacactgtatcagagaaacctttgtggtgaaaatagcaaccctacatcatcactcccttttacctcatcagcttcacttttctttctcagtactaacatattgtctatttagttgcttgctgcctgctgttgcccattaaaaggcgatttccatgaaagcaggggctttacctgttttcatctgctttggttcactgttgcattaccaatacctagatagaatctagtagatagttggcactcaaaaatatctactgaagaaatacatgaatgaatgggtgattttctacatcacaatatggtgaatcatatgtgctcataaataattgtatccacaatgcatttgtcagtcctttccattctttaaagctcagaaagttacctacatacaaagtatatgcatagacaagcagattattcattcaacaaatatttactgagtgggtcctatatgtcaaagcattgtagtgggcatcaggggtacaaaggtgagtaagatccactttttgacctccaggaggtccatccatccacccatccatccttccatccatccacccatccatccatccatccatccacccatccatccatccacccatccatccttccatccatccacccatccatccatccatccatccacccatccatccatccatccatccatccacccatccatccatccatccatccatccatccatccatccatccatccacccatccacccatccatccattcatccatccacccatccatccatccttccatccatccacccaaccacccatccatccacccctccatccgtccacccatccatccatccttccatccatccacccaaccacccatccatccacccctccatccgtccacccatccatccatccatccatccatccatccatccatccatcatccatcatccatccatccatcatccatcatccatccatccatcatccatcatccatccatccatccatccatccatccatccatccatccatccatgctttcaatccttttgagccccagccaaattccagccactgcatatttaagatagtatttggcacatcatcttatctttctctctggattgttaaccctcctaatggcagggaacttaataatttagttgtagctctgtaaaaatcactaaattctgagtattagtttcctcatctgtaaacatgggtttgagacctctggtcagcccaccttacagggatgctgggaacgtccaatgagatgattcagaaataaaataagctttccacatcatgaagtcctaaacacatataagggattctcagtcagtaaatgctaaaaccgaaaccaaaaacccaaacaaacaaaacagacaaaaaaacccaactacagtcctttcctcagactgcctctcagtgggcctcagagcccggggcagctgctgcagctggcgaggccaatctgccatcactcagaaattccacagttggacagaaatcaggacaggcagcccagctcccgtcaaggtgatcctctgcagattaagtagaccatcaataatctttggtaaacatctgactcaagcgtgcaccagctcttcccgccctccttgccctccagctgaggctctgttggctattgtgtgctgttctgaagttttagcaacctcctttcatgtttttttttttttttaacctggctggctttggagtttcttacgtgatggagcttgagagtaaatgaaagtgattcctgaatgttgacatgtaaacatcattgaccagaccaggccctattcaaaaggaagatattctaagtcttccaaactctaatcaaagtgaatagagagagagagagagagagtgagagagaatacaaatatgggacaaagcaagaaggtaaaggagcaagcaaagagagaatacctattagaacattcttcctggagccatgaacagatctctccataagctctggaactttctagcctccacacttatgctttcccttcctgatagagtgcctgacattgtcagcattaactgaaaaggtggaggctgccagactgagctggtgaaataattctatgggaacaaagactcacacttctcctctgtgcattctcacctataagggctaaaacaatttcaaattaaatacctcgaagaaatccttttttcctcagccactttcccactagatccccttgacctgggctataataacaacatctacaataataatgatgatatctgctggataccttttatacagtactagctcagccaggcattgtataaacactgccaaccacaagaagcgtatctacactgagactccagtccttcttttgggatattccccgtgatttcagggtccaggaccttccatcaagttatgcgctaatggaagctcatccctattaacatgttgtctttctcttgtattattattatttttttaacatggtaaggcacactttattcaagagggctctggcgataggcatagagacctttgcgatgagatcttgcagctggcaagagagactggacccaacattctcccttgtacgctttgattttatggaaaaatttcaaacatacacaaaaagagaaaagtgcaacaaacaccacataggcctactacccagtttcaacaattaatatcccgttaatcctgtttaatctattcccaccccctaaatgttgtttttagggaagattataaagcaaacaccagacattagaccatttcagcaccaccccttggcattatttgtcttttcttttcactttgttgaatgttgcaatgactctgaggacccagtgagatttcctgctatggatgggaggtggtgtgaggtatacaggaatataattaattaatcatatattaattaatcaaatctatattaatcaagcctaagccaccaatccactcacttatttatttttgatattgttttatggtaagaattgttcaagttgccttatacttattatttaatgaaacaagggattgaaactagatttacccttaaaaactggggctgaagacagacagtaaagctaatcattttcttggcttctgaagatgggtgatccaaagggactctagagttccttgtcagggaacaccaaccactggagaaataggatccagtccctccctcttctgtgggcttcccaggactgagtgatgaggcttcagtcaccgagtggcaacagtcctatccatattggggctgaatataggaaatgcagaatgcatgaggaacagggaagctgaaaacatagattgactgtgtgcacacattgctatttaattatttatgtgaactgcttgccacgtgtgcttaattaccttgcagcacgataatgaacaggtctgtcattaaaatcccattggattctagtgatgaaaactctctctgggttttcctggccttcttttgcagcaggcaaggttgctggctcagaacttaaaaatatgagtggtttgttcctggctaggtctctggtctctgaagctatggcaattgcagttttgtggaacacgtttaaggctctgatgggagatttggcacatctatggccaaagaatggctctcttacccctgatcatgccaaagtttgggcaaaaagtctcttcttgaacttttattgagatgggacagattggagctgtaaaccaggcctgtgggcttatataatttccagttcccctaaagcaattgttccagagagctggaaaacatatttacggaccagctcttccccagactaattaaatcaggatctctgggagtgggggctggtgctgcccaggtggagacccactgctttaaagcaagtacatgttgtgcacacagagtcttactttcttctccatctttctctgttaagataacctttttttctcaaagcttttgagatagaagagatgtgttctttttaggtttgggtattcaggtcatgctggcttcataaaacgaattgtgggaaattttcatcttatgctatggtctgaaatagtttgaataacaaaggatctatctggtttttgaagactagctagtacccggttataagaccatgaggacttttaaaaaagggaatctctttaataaaatttctaatgtattttatgattattggtctattcaggtgttccacctctttggggacattttattttgccaggaacttctccatttcctctagattttcaaatgtattgccatagattttcacatacaacgctttgataaactcttttgcgcctttcccaaatggtgattaaatcttctttctcactctaataaacttttcaaacttcctccattgtaacaatattagctaatgcttattgatcactgatcatgtgcagagcacacggtcctaactgctttacttgtactaaactcagttcatcctcatgacaattccacgaagtagatactcttataatcctcatgctacagttgggtatgtagagaagttaaacaatttgccattaggtcacatagtagcatgcagctctagcatgctgcctactaacgtccccgtgtgtgtgtgtgtgtgtgtgtgtgtgtgtgtgtgtgtgttaagaattagcctatcatttgaccatatagggttaagacttagaggggagggggactcttcacccaccctctcctccttgtgtcctaagatgtgctgccttgggtataaaattaattggaggtgggggtgatgtcatagctaaccccaaattctcattaaacaaaacaaaacataaaaataatgaaggggcggaaggagtaacaacagcgtggagctgcaggttcctgctcaaagctcgtaagcggggagtatgaacttttaagaattttgtggctggaaggtgacaagagtccaatggcaaagagtggcccagagacttggggccatgagttccaatgtctagatggaggattctgtactatgtaatccttttggtgacctggcccaaggttacttacttgttttgaatgttcactcagacaatgagaggcccacaccagcaacatggagcagacacgaatagggatgaagaaaataaccacaaccacctaaaaggggtgagtggttattatgctctactcacagccacatcacactgggcaacctttgtatgaaaagatagatttaaaagatcttccaggacggctctctgtcacttccagaacaaaagctcaactctttcgtgtggccttgaaggatttccaccaactgacatcaagtggctttctaagcccatttgctgctgctcccctcagcactactgctgtgtcagttgaactaaactcccagctctatatgtcattgtatgtctgtctttctgcctttgcccatgttgctcccaccaccaggagtgccctttctccacttctgaatatcaaaatgtgatgaatacttcaaggtctagcacaaatgtcatgatactgctttcaatataactaaatcacactagcactcacatatacttaccagcaatataactaaatcacactagcactcacatatacttgtcagcacttgatattcgttaactgatttaacttgtaaaagaatcctgtgaattatgtactattcttatccctattttgtaattggggaaattgacgatcaatgatttttccaagactacacaactgtctagtagttgagttgggatttgaacccatgtaatccggctccctgctctcaacccctctgcacggtatctgtgcctctcagcaggcatgagctataatgacttttgtatttttcttactacacctaccagacaataagctcctccaagaaaggctgtgggtctggtgcacctttgcatcccatccagttggatgtgccataactatttgctggatgcagagcgctaagccagagttggtcatggagcttgttacaaagcttagtaaacattgtagagaagaatacagtactaggtggatgaggtggggagggcaagggggaaaaatttgcaaccaaggtccatcccttctgacaagatacttagggaggctgacttttaataaatgatacagtggaaaatcactgctgaagagtgatcaaatgcaaatccggaaggtacaaactgagctaggcaagggagatgctggcagaggtgtggaaatcttcaggcttttagggacctggaaccatgccttaaggccttgctacagaaagcgtggtccctggacaagcaacagcatcaatgggagcccattaatcacgctttttgccattttaaaaaatgggttcaaatcccatttttaatggcaaaaaccacaattacgtttgcaccaacctaagagaaatgccccaccccagacccatggaagaagaacctatattttaacaagatcctcaggtgagttgcatgtaccctaaagtttgagaagcacgcccagaaggccagacattcaggcccacctccatagactgtggcttagttggtttggggtggggctagccagggcaaccacattttcaaaaacttttacagttaattttaccttgcagtctgggccagaaccactgccttgctcttctctagaaactggtggagtgaaaagatggaggagggcaagggatggagaatcccacttctgtcactaatgagctatgtgaccttgggcatgtcattcaatatcaaatgaagaaagtagattagatcagaggttcatgaaactcagaatcagaaaatacacattcctggatcaagtgaattataattcccagcactgggcctgaggaatcagcgttttcaacaagttccctagggatccttgtgtagccgcctggccctggtattggggatcagtcggcaacatgacctctaggtcttttcctctactattccatgatcttagagaaggagaattttgccccaggttctaaaagcaatgataaatatgtgttggtataggttcaaacatttcatttaaacattcaacagttcaaacatttttgactgcactggaacctgctgtaagaaatataagtacttttcatgaagactatatactgtatatatagctccacacctttcccttactgtgatccactctgtttccttcttttattttcaaatgtaccactctgctgatttcatgatacactagtgggttgagataatttgtaaaacctggtgcagacaatctctgaatcaagaacaaagtcagggccagaaagccagaatctgtgtcacctagcagaggccagacagcaccatgctgacctgtccaacccataaggaacccaaggggcagctgatcacaacatgtgaaactacaacaaagggacactggttgggaaagctggaaaggagaagagaggttagtggaaggctcaagactccaggctgaggagtttagtgacgatcacagaggcaatgtgcactctctggggcttccagaacaggcaagatccacaaagcatttacagcagtggttctcaacactagaaatacatcaaattgcttggaaagcactcacaaaataccagtatccactcccagagatgctaaaccgctaacccaaagttctcccaagtgaatggactatgtagctgggatggaaaaaccactgatccaagagttagttaaagaggcagggtgacgtaacacaagaaatgtgggctttggggtctcttaatttctctgaagtttcctgtggatgaaatgggcataacaacatccaccttagcagcttgttgtgaggattagagaggaagttacatacacacagcagctgctcagtcaaaggtggctccattcatttttttttttttttaatggagtctcactctgtcgcccaggctggagtgcggtggtgcgatcttggctcactggaagctccgcctcccgggttcaagccattctcctgcctcagcctcctgagtagctgggactacaggcgcccgccaccacgcctggctaattttttgtatttttagtagagatgggttttcaccatgttagccaggatggtctcgatctcctgacctcgtgatctgcccgcctcggcctcccaaagtgctgggattacacgcgtgagccaccgcacccggcggttgctccattcttaagccttcctcaggaccagtgagaaccctaagccccagaaaggcaggtccaagttcacgcggctgggctgcagcagagtggggatgtgcggaggctcagctctagatgtgaattctttggcactgtgggcctcctctcaggacagaacagagctcagggagggtcttgtgtatcaggctcatctaaatccaactcaaatgacctcaaatggccatttctctccttcccccactgaacttctgtcagagcactgggccaacagagagtctgtcacacaaaataaagccttagttttctttacccaataaccaggtcatatcctctccctaaacattatacaagcttgcctttcaacaggatagtgtttgattttgacacatttgagcttgacgttcttttctcatagaagtatcagtacgatgcctccgtggtgaaaatgcagtcgaagaatgatttttcagcccgtgtggaaggtgagtgggatgggaagagaggggtgatggatcggccagctggaaggcagtgtcagcaattcagacatgggtggaggaattgtgagttttatgggttctctccctaaaagatgttgaagtcctaaacactagcacctgtgaacgtgaccttatttggaaatagagtctttgcaaatgaccaaattaagacaaggtcatgagggtgggccctaatgtaatctgactgtgtcattacagagggaactctggacatagagagtgacatgcacagcgagagcacctggtgaagatgaaagctgagatgggggtgaggcatctacaagccaaggaatgcccaagccttccagcaaaccaccagaagccaggagagaggcagggagcagattctctctcgcagccctcagaagggaccaatcctgctgacatgttgatcttggacttcctgcctccagaactgtgagatacatttctgtcacttaagatatccagattgtggcactttgttatggtagccctcgcaaactaatgcagtggtgtcagatccttgttcaaaggacacattgtcacgaacagaggcaaagagccccaactgtctcctttcaagagctagaacttcagaagagtaagcatgctctgtcctacaggtgactcttaacccgcagttgagatgcctggctttatcttctgcagagatctagccttgaaataaagcttgtgatctaatttcaagactaccagcctttttgttggtgttctcaaatatgcctgcatcggagcaataaccagtggcaattttcatatggactctctcatcagtacaataggcaataacccttacctcaagcttaacatatgtgaggcatttgccttttgtacatgaatccacccaattttcacaaccaccctattatgtgtgtactatgcttatgctcattttacagaagagaaaactgagtgagacacataaaggtagagtgagacacacagaggtagagcaactttcccaaggctgcacaactagaaatgttggagctgggatggggatgcaggcaatttggttccagagtctgtgtccttctacactacaaaaatggctaccacatgctgagggcttactctgggcaggcactttccaaacactgacattattaatccattttacacgcacaaccatttagctaagcttgcagactgtttattttccatattcatacttccagggaagctattttaattttaaacataagatggccagccattacccccacttcccaaacacatacgcacagcctgggccctcctccaaaacaggtcactggctggggatcctatagcttcccttgacgagtatcttccagcatcccacgattcacctctccccctctcaacatgcttatgccctccccaacttccagtccttatctccccagccaaaatcaggaagtgattctttgtgggcagcccaacctctgaaggtcaagctcattgcttttcaaattagaatttgaagggtcttttcctctcctggtcagagatgagtgggagctgtcagatctggcctcccagcttctgtaattgatttatattttggtataaaataactcttgattttactgagggagtcagaggaggggaagaggtacaggggatccacacggaggcaaagaacagacagaaaataaaggagaagaagaaaaaccaagaatgattacatatctgtgccaagaactggggccaggtactcagcacattgctcctattgccaacagctgagagcggttaggcagtgtgtggcaggaagctggattggaacccagtactccttcagctgcacctgagtaagagtcccagggaggctgccggctggctcactgtctctgacaagcagcaagtcttcttcaggagaattctcggttgcataaggaggcagtttacaggactctaacaatcactgtcacctctggaaagtcaaggaagggagctctccaaggttccctgtgccactcagggcgacactgagaaagcagatatgatcgctttagaagtccgtgactatgctgaatgttacatagctgcattgcagcagcctaggaggtggccacactcatgtggccttcttggaccttctgacccaccagccataaatgctaacaatgccaaatgcggcacagcttcctttcagaatcagtcagcaagacaccctgtggttcatgcttccctccaaatctgcttgctaacttatgaggaaatagatctttccgcctcagtaacaacaaaattggtctttgcatctgcgaaaattatgctctagatgacagcaatcctgaacattaatcaagtatcaatcactgacatgagtggaaaatggagctggcgtctttatttaagtcttgttttgagcaaagcaaagcaaggactgattgcggagaaaaccctttaatgggtttgaaacagcacgttgcagcatgagcttgatggctgaggtctggttcaatgcccagttctctctctaaatggctgtgctccttgtgcctcagttttcccatttgttaaaaaacagaaacatcatcacctctcaagtcaccaaaggattaaatgagacaacacatccccacacagaaacaatgatctattagatatattcagaataacctgggtctgtgtccttctacactacaaaaatggctaccacatgctgagggcttactctgggcaggcactttccaaacactgacattattaatccattttacatgcacaaccatttatctaaatggttgtgggagactaaatccgctagggagagagtcccttatcttgcccaagagcttagagtatatttaacatgctctgtgcccacaccaggggaatattcttttttttaggggaatattcaggtttctgagctgcccagtccccacccaaagggcttgttctccatgtgtcagcagcactgtcctgatctccctctgggctcatcccaacttgccagacttagatcttacccccttaaaaaagccttccacccacaaatgcaaaacctgaatccaatcacaaggaatcaccaggtaaaccaaatccaagacttgtaatctttaaaaacatgaaggccatgaatgacagagactgaagagacacaacaactaaatgcaatatgtactccaggattaaaactctttctttactttttttttttttttttttttagatggagtctccctctgtcacccaagctggagtgcagtggcacaatctcggctcactgcaacctccgcctcctgggttcaagcgattctcctgcctcagcctcccgagtagctgggattacaggcgcccaccaccacgcccagctaattcttgtatttttagtagagatggggtttcaccatgttggccaggctggtcttgaactcctgacctcaggtgatccatctgccttagcctcccaaagtgctgggattacaagcatgagccactgtgcccggccaacaactattttttgctctaagggataactggcaaaatttgaataagctttaatcaatgatgttagtttcctgataattgtactctggttatgtaagagaatatctttgtttttagaaaatacatgttgaaatattaaggggtgaagggatacagttttgcaacttactctcaaatgggtcaggaaaaaattaaaaatataaatatatattaaaaaaccaatctgtatagatacacatatatataggggagggggtggacagtttttgcaacttttcggtaagtttgaaattaacttcctctccccagaggagcactccacaattgattacactctttcctctttctcttttaacatccttgtaatatattttttcatgtgggccgtgtacgggaattccgtttgtacgcctcgtaccacttgacttacaggcaaataacattacagctggaaggaaaggtcctcagagaccacataatttgaaacttctgggtgctgcaaccaggctgagaggggtccacggctgttgtcacccagctgaccagttcccgagctgccctgtgttctaggggctctttcccctacttcacactgcatggccacgcaatgcaagaagctgcaaaggagtggcaggtgcaaccgatccccttggcctttgggacgatgctgggcctgttgggaggggcaggaggccctggagtcccggtcttactctctgtttacccagagtggagccatgatgtgaaaaatgtcaggaagctgctctaatcccatctgttcccagggctctaggtaacacctatgtgtgaatgggcctcaaatttgtctctctaaccctgacctccacctgaggtccacactcctatatccaactgccagttcttgaacattgactcagcacctctaacataacatgtcccaaaccaaaggttagatttctcccttcccctgcttttccctgtctcaggttcagtggaccattcccccagtggttcaggccaaaacctcaggctcatctaacctcctgttgttctctcacactccatatcctagcaaatcacgtgggccctattttccaaacatattcagaatctggcttttcctcagtgccgccaccaccaggctgatacaggccaccaggactgctcggctggacttttacaagcaccttgtgacggtgtcctgttcccacccttcctgtgtctacactgtattgcctacccaacaaccgcagtgagcatgtctctctctggctcagaaccatccaagggcttctgtgtcacttataataaaatctgcatccttagaaggatttacctgactggatccctccctgagcagtcaatctcttttctcacattcttcactccttgacacttcaggcatctcatccctgtgttgtcccaggggcatgagagcctggcatgtccccagcttctgcgtctctcccctggtgccctctctgcctagagtcctttggccaagtatctacaagaccctctcgctgactgcactccctgattaccttgtgcaaaagagcactctgcccttcctgcactgacttttcttcacctgacatcatacacttctttgtttactattatatcccccaggaagtttctagacacagggaatctatgtggttctctgtgaatcccagccactgcttggcacataataggatctccttagtactgtatttactagattaataaatgaatgcattattaagtcaaaaagcaaggagcagaatgatgcataaaatgcacactcatttattttaaaaaggaaaaatatacacatgtatacttgcttatctttgggaggatggaacagccttgccttctgcaatggtgaatgggtgactgcgggcaggagtaggagggagacttttcactgtatacccttctgtgatttttttgaattttgtagtagatacatgcgctatctgtccaatgaattaaaaacagaaaaacatatttgcccctgtgatattgtgaactatatatttggtcttcaacccattttttggcattcaattcttaaaatccttagaagcgccaaaatgatgtcttttgcacgctaatgagttgactgatggcagcgggtaagtagcttcaggatgggggctgttcaccagaaagaccaaggcaggattagagggcggggactttcagctccacctgccaacctctgggaggggagagaggctgagggttgagttcatcactaatggccagtggtttaatcaatcatgcctacataatgaagcctccataaaaacccaaaagggttcggagaacttctggatagctgaacacgtggatgcttacagaaagattaagaggaactcactttcagggcagggtggcacactctagctccatagggacagaaattcttgtactcgggaccctcccagaccttgccttatgtatctctttatctggcagtttattcgtatcctttaagatatcctttataataaaccagtaaatgtgtttccctgagttctgtgagccactctggcaaattaattgaacccaaagagggtgttgtaagagtcccaacttgaagccagtaggccagaaattctggaggcccagacttgcaactggtgggacagtggggggactgagtcttggggactgagccctcaccctatgggatctgatgcgatgtctaggtacatagcgtcagaattgaattagaggacatccagctggtgtccactgtggaagtgattgtttgcttggtggtgggaaaaactccaacatgtttggtcttagaagtcttctgttggccgggtgtggtggctcacacctgtaatcccagcactttgggaggctgagtgggcggatcacctgaggtcaggagttcaagaccaacctgaccaacatagagaaactccgtctctactaaaaatacaaaattagccaggtgtggtgacacatgcctgtaatcccagctactgaggagcctgaggcagggaattgcttgaacctgggaggtggaggttgtggtgagccaagatcgtgccattgcactccagcctgggtaacgagcaaaactccatctcaaaaaaaaaaaaaaaaaagaagtcttctgttgatgattgttgtggtgtaagagcaaaggaaaaacacattgagcatgatttttgcacacacaacacccaactctaataaaatgattatgggaagacatattcagagcagacttagtctgcatttgtgacaagggacaaagggcagcggtgggatgctggacctggaatgtctaggagagtggtccagctcttctctacctgtgagactctggctgggttgcctgtctggtctcagtaggtcccgagttgctctactgcaataaagggttggggaggttagatccgaccatcttagggatctctctccagctgcatggctctgtagttccatttgattggatgttacctgttggaccacacaaatggacaggtcctacgctatgccctcgtgagatctctgcagacccagcaccaatgttgcaggaatcctcctgccagtgacacagttaggtgtccccctggttacctgggcctgggtatgactgagctagaaagctgaggctcaccctcctgcttccagagtcttctccctcaggcctgaggcttggggcttttgcactgtgtacctctgccacttgaaactctctggggagctgagcaaaacagcactcagggccaagtgtggacagggctgcctgtgtctctagagctgggcccaccccggagataaggagatcgtcaggtggtctcatgaggcagcagggcacactaaagtaaactttcctttcctgaaaaatgttagtaagaaaaaactgcaaacgaaaagagctttcagagtgtttgggggaaggccctctgctggggaggaatgtgaggagtgagagagacaatgcttgggcaccattctaaattatctgcatgaggagaaggaagggaacagcttgggggcacaggaattcgcccctcactttggaatgccccaccttactgttttccttattagatttgtcttgttgatgattttagactgagactaatgttaatatgagtttagattctgtctgcacaggccaaggggttggtggagaaatgtttggaagtgttttgggtttcagaggaaattccttgcaggattaaagaattttctctggatagccctcaaaatagagtttagggtatagttacagtacaggagagtaaggaagggtaaaatcatcatactgcaagtcaaacaagaatgagaaagaaagtgggcttttcaaaagaagtttgacaatatctttagtccttaaccaatgattttaagtctaattctacctttattttgaaagctcaagagttctagtcttcggagttgtcatttgggggtggagataggggcaggatgtacacacagttgtcaccctgagaaaaggggccactaagagaggttgtatgggacacacaagaatcacctgaacccaggaggcagaggttgcagtgaggtgagattgagccactgtcctccagcctgggcaacagagtgagactctgtctcaaaaaaaaaaaaagagtgagaggttgtatcccttaatatccctggattaatatctttcatatccttggatattaaagaaagtagtagacagcattaggttgatttcatctgggcagcaccagatcacttgtggggcttctgacttggcaggtctcaggtagggtctccacttctttatttcaaaaagcttcagagatgactgtaaatcaacacaattgtctgttgtcacccctgcttccttctcccccaggtccaaacccaccgttgaggatcactgttggctgtattctgggcacttactgcctaaaaatggactagtctgtgaaggttcttcctgcactatgcacctgcacgatacacctaaaatcttaatttgcctttaacagctgtaccccacaggaacctatgaggtcttcaaaatgggagaacttgggattgacttttttcttcccactcatttaagtgcactttgaaccatgtgtagactgcaggcactttagaaagaagctgagactgaaaagtctgtcttgacttccaaggaagggtaagtccctgtttgcagccccggggcctgctcattgttaagtttgtgtttcaaacaacatactttgtgagcagttaaatatgatggataatataattttagatttataattgctcttttttttttttgagacaggatctcactctattgcccgggctgagtgcagtgatgagatctcagctcactgcagccttgacctcccggctcaagtgatcctcctgcctcagtttcttgagtagctaggactacaggcacgtgtcaccacacctggctaatttttgattgttttgtagagacaaggtctgctatgttgcctaggctggttttgaactccctccttggcctctcaaagtgttgggattacaggtgtgagccaccaatcccagcactttgggaggcagaggcgggtgcatcgcctgaggtcaggcgttcgagaccagcctgaccaacatggtgaaaccccgtctctactaaaaaatacaaaaattagctggccatggtggcaggcgcctgtaatcccagctacttgggaggctgaggcaggagaatcacttgaacccgggacgtggaggttgcagtgagccaagattgcgccattggaccccagcctgggcgacagagtaagactctgtctcgaaaaaaacaacaacaaaaaaagttacttttatcaatcactcctttggcaagcggcttttccttttcctcagtttgcattcaaagccttccacgatctggttccaatgtgattttcaaactggcttctctcatagctcctgcaacccactttcgttgcttcaagttgactggctgcctcactgttgttttttccttcaatgctgtaataatggcataggattatatcattagaatgatgaatgtatcttgacttaactactccccaattgctgaacatttttctatttcccttctctgtgttttactttgccaggaagggtgtctaaggaatcatgcagtctagtggctttcagctttggccagtcactggagtatgggattactccatactccatgggaagggatggatgggaaggtgggagggaggtgggagtgttataaaactctcaatggagttatgcatataggaaaaggcacaaatcacacatgtgctgctggatgcctattcacaaacaaaatccccacgtaaccagcatctggatcagaaatgacattcccagcaccccagaaaggctggggtgtagtggctcatgcctgacgggtgaatcacttgtgttctggagttcgagaccagcctgggcaacatggggaaacccccgtctctactaaaaatacaaaaaaaattagctgggcatggtggtgcatgcctgtagttccagctccttgggagactgaggtgggaggattgaataagcccaggaagtcgaagctgcagtaagctgtgatcttgccattgcacaccagcctgggcaacagagtgagatcctgtctcaaagaaaaaaaaaaagtctcaccttcagattggtcatttgatagctggatttctggatctgaggtaaacccaggaatttgcatttttcagattctcctcaggggcctcccatttaccactagacttgaagactactcatctaccaaggattttcaaagggtgcccctcaggtgtccccctggggatgtgggggtagagacagggagccgtcagctctgcctttccatggatcaaaatcactggaatctctttcttatactgggcctccttcggtagatagcaatccttcaaacaaccataatcttgaaaaccacccatatcagctctcaagggaagaagcagaacacaaggattaatacagtacagacatatctatcagcatttacatgaatttatttcaggtattgaccttttgcaatagtaagagctggttaagcagcttctacaaggtggttgtttttgcatctgatgtgagtatgtgaggttcacaggacaggcagtcgggaagaacaattgcgaattcacaggccttaactggaacctcatgaagatggactgaaactcatgtcacttcttgttgcctttgacctcgatggtacaaatgtcctgcagaagctgcagctcttcagcatggagctaaatgcacacacctggcccaggagtcagagaagctgaaggaggatccagaaggtggaacagttgcaggcccggctggcaaatgagtgacaacgtatgtgttgcaaagtgctgctgcctttccatccttggaatctcccaagaatttctcttaggctccatcccaattagaaactcacaggacagggaattctaggaaatgtagttcaccctagtctaggatgtgtgacagccaccacaccaccctctgactatcattcccatgcttggctaccactggaactatgcagagtgttagcttcccaggtggctcaaacatgtagttgaggctgagaagcactggctgtcaactgtcacgtggatgtgaactttgagactgccccaacccaggtcccaagaagataaattctacacttttttcatcgcaagaagagcataaaaaggtctggttatttttcctaaggtcctaaaatgtggcttttctcattatcctgccttcctcctgtctgtcttgtctcagctaacccagctacaaccttcctgtagtcctcaacacagtggccgcaccctgaacaaagccctcccttgtttaccctcccggtacaaagtggattaagagcacagctggaagaccccaagatcatccaaatgccaccaagctcatagtgaattgaagaccatagtgaattgaagactcagaagttttcactattaggcttctaaataaagcatcttttcctctgtgacacagactaattaaatgattgtaacacagccaagtggtcagtgaacacttaaccactgtgatgtgagccacagagctggtgagagccagtgctgcagactcacaggtggctgagctgctgctgctgagtctttctcaaggacggctgaaggagaagccactggaggagataggggcggttgtagaagtgggaaaagagttgggggctggaaagagctctggtgcaagttgcagctctgcaactaagtggccactggggtttgcacaagtcacttaaattttctaaacctcaacatcagccctacctcctgcacaggataattgagacatcaaatgagagaatacacgtgatacagtctgggaggaagaaagtccaaaagcacggacattctgtgttagtagttttaactctgttatagatgacactggtataaggtgaagattatctagtttatagatggatttttatttagatattttgctttctttttcctatctatgatgtggttgtttctaaagaggtctgctggagtgtgagattgacacaagtgactaaaatgggatctttgggattaactttgggtttttattatttatgctctccctctcctctccattacagcagacagctgaagacaggctgaaccacccattctacactctggaaataagtttacatagaaagaacccttctaagaaaaagcaacagctaactcatctttcagagcatccttgaggagtaaaactgggaaaggatcaggcagtgctgctctatgtttattggtatgttcactatttatgggagttttctctttcagaatcatattttcagcttcttgagggcaggtctgaatcctgatgaggctttctgtctgcattagtgcctgggacagtgcagtagaaaggatgtgggttgtaaggatccaaagttctgagatctagttacagctctgcccccccaaaagccattttaatccttctcggtctcagtttcctctctgtaaggtgggaattacccactgcatgggagtattgtatagcacaaattagacaatctgtgggaaaatacttctatgacccaaaacgtgctgtgcaagagggatagactgcggtaagagctctgacgtctcaagaactctatactggttgattttcctgttgaggataggcaggcacagagcacaggtggtcgaccctgggcttcagacgggaaaacactcaggagtggaggagaggggaaggacatccctggcagcccctggagagaccacagacactttctcactgcccatcttggaagatctctgcactatctcttttgcttcaagctgtttgttagtctggtcccttgtttatttgttcttttcttttcttttctttctttcttttttttttttaagagacagagtctcactctgctgcccaggctgaagtaaagtggtgcgatcatagctcaccgtggtctacatcgtgcagcattagtagtacagtggtgagcgtagctgccttccatagctcatcgcagtctcaaattcctgggctcaagggaccctcccacctcagcctgctgagtagctggactataggcataagccactgcacccagcatattttaaatttttttgtagagacaggatctcactatgttggccaggctggtcttgaattcctggcttcaagcaatcctctccccgtggcctcccaaagttctgggattactggcatgagccaccatactcagtctattggttcattttttaaatcagatgttcactgagcacctactatgtgccaagcactgtgccaagaattgagaattgaatggtaagcaaaaccaggtaaggtccctgccctcatggggtggaatctggcctgtttcttcccaaacatgacttgagtttggactcaagcctatgcactaagtcctgtgggtaccatccagccctggggacagacataaatgttgtgttttagtgggattccagatataagctgaaaaatatcaacaagtttaggccaggtccaacaaggaaaaaagaaaaggcaaaactcccagcaacctcttttttgggtcttccttcctgtgccctcatcgccggtttccagagtcatactctttatggttttaccctcttttggaactctcacctaactcattcatattaaggtgtttccttctctagaagcactgaatttaacagggaaaaaaaccttaaagaaatgataccccagctggagggatgttagaggacatcctaaatcacaccactagggtagtcatttcagaatggcactttcaggggcaacaggtatagaggaaatgggtgctggcagcagggatgggttcccttaagcaaatctctgtgctctttaaacattactcaaggtaaggaggggaaaggcagggagcaatatggctgccatcagggtccttgtttttgtttagaggaggtgagtttgcaagggcttattccattactataagtgataactacattattcactgtataaatgaacgtggaaaaaaataaagaccaggggagtcttctgtagccagagcctagaaaagccccatccactggtcctctttttaaatttttctctaatttctgaccaagctgtcagacaatcctactggtgaatttccagctggaatttcaatttccctcttagtgagaaaagtgagacacattttattattagatcctaatccctaaagtgaaattcccgaaagactgttggttacgtgaaccctgagtagactcattaaaagaaaagctttgtattgtaaaataaagcatgggcactgaacaccacacgaaagagatgctctgcgttgggagggatgggaagggcaacatccaggtaaccgtcatgcaggtggagacacagaactttgccaagcaccccactccatgtgtctggtctgcttgtagccacccacctccctccaaaagtaagcagactcctggctccacagtctttgtgtccttgtgtgtgtttatgatgtcatcacccacgcgtgtatcgtcagaggctgcatttcagtcctcccattttttgcatgccttttaaacttattttaagtgaccaatttccccctcattcttttccttacaatttttctgttgaagactcttgctgtccaatctgcagtttctcactgtctggattttgcccttgatgcatgccaatatgtccaaatgcactcattttcatgcaaataatcacccatttaaaaaaactctgtttgccagccatgttcttaaggagggcacaacccaccataatcactttctcatgagcatgtgggcaaagggagtgctcacaatagaggtaatgagacagagagaaaaatgtgaatgtgatttatgaaaaagaaatatatatatttccaattggaagcgaccagggaatgcttctctttaatgcctttcaatatagtttgctttagtaggaaacacatttggaaagggatttggcatcatgttgtactctagggtccagggttgcatgcattagtttttatcaaagatgactgcataataggaacctggatgtagcaaaaacctaaggaatctaaaccactaaccaagctcaccaaatgtaataaatataaatcacagatgaaaggaagattaaatctggctattcacttatgcaagaaatgaaagctttaagattttttttcgttttctaatctcagcaggcaggcccatgaacataattattagtattttcaaggcttgatcaaatattggctaataaagaactcattcacttaacggtgatgacctccaggtacctgcagtaagtccagaaccctaaattatatgctccagagctacggcacctacatgatggacaaaataaatgaatagtgttatactagtagatgggagttttttttaacacttaaaattaaatatgcctgaattaaatacctgtttcgatttgcagagggggaaaaaagctcccaaaagatggatatgataaaaggctcccttcacacccaacagactacaaatactaccttcaaaaccatcacagcattagttgtacagtcacgaaaggggccaaaaagacatagaggggaataaaagaaattaggcgagggcctaaatgagcacatgctcgctctctattcttatttctttccttggttttcctagggattgtatttttgaaaaaaaaaatcaggtttgtgaggcctcctctctgctcacattcactagagagaaggtaaggacaaaaagggatagggagggaaaagataatcacaagaaggatggaggcaaatttcacaggcagactgatatcttccttgggctcaggagttttaaaactctgcttgcaagattaggttcttgcttttatagtatagatggtaagagatttccaactctgattttacaatgctctggggtatatgcaattattatgatgtgtgcatttaaaattctcaaagccaaattaatttgaattctttttcaccaaaaaggcagacattcaaaagcttttttttttttttttcagttaccatcctagtctacctttctgtattttttttttttttttttttgagacaggtctcactctgtcacccagactggagtgcagtggcacggtcacagctcactacagcctccatctccggggcccaaggagcgatcctcccacctcagccccctaagtagcttgggctacaggcatgcaaaaccccgcctggctaattttgacatttttttttttttgtagcaatagggtctcattatattgcccaggctggtctcaaactcttgggatcaaacaatcctcctgcctcagcctccaaaagtactgggattacaggtgtgagctaccatgcctggctctttttgaaagatttgatactccttggaatttaccctgcctgggccctggtacacagttgctctgtttcaaggctaagtacttgtcttcccagctggctggtgctcttcttccaggccctctctggatcactaggaattccatagttcttccctaagccttttttccatccttgtccctcttccgagtccctactccaaaacccctcatggactgctctcttcttgaggtttcccacctcggcctctaagagctatggtggaatgaaattcctggtgggcaggctgggctggctcccagcagtgatatgtgaagggggaagcagaacttcgcaaggggaataaacctatcagggccttccatgcttccatcagctcacttctcctcctgggctgggctcaatctaagtatgttacatccatgacggtgattaatcctcataccacctctctgagaagcatgattatacccattttccacacatgagaagatttacactcagtcagagcaggagctagacaaggctggctgagcagtgaaccttgctcccagcccggctctgaaccatcacactcttcagtgtgaagcaggagattttagcctcacgtttctggacattggaaggactcaagagctttggggtttgctcctttggtagccagtggaggacagatcagtggtgacaggttctggctctgtggccccctgccatgccactctgaaagggggccctcccctgcctgtgcctaggcctccctggccaccacccagtttttccatgagggtctaccgcagaatgcaggtgtgaagtctttactctgtacctccctacactgcccagggtagaatgtgctggttcttctcaggactgtgccatctgtagatagaccagggccttagccttccttcttagcaaacgaagtgtatcagttcataggaaaccactctgctgatgacactcaacatctgaacacaggacagtaaaaaaggcccttgatttgggaggtacggggaagagaatggagacaggcacgattctgtctttacatcttgagccatccctgcggaagggggtccgtggggtggccgggggtggtaaggcttcaaatcctttctttgaaccattttaaagttttcttgcatgttgcctcctttccccataaacccatgtaacacatcaccaactactacacagaaaatgttaaatatataataaatatactaaattatataaaaatattatttagtggccttttttttagtttattcttactttttttttttttttaatccaggtacccaattttatcagccacgtttggagtaatgggttgatgaatgttgatacagtcatggggtttcatttattcattatgtcttccttcttctgtgggaggcagcgctgagatgataaatgctgggctcagatccagcttgggccactcactcccaagattcatacacaaacagaccagcttgatcagggcccagcagggaggtgaggcttaaacctcctcgctggaggaggagccaataagaagactggcagcttggatagtgagtgtgtgtgtgtgtgtgtgtgtgtgtgtgtgtgtgtgtgtgtatgtcagagtgacctatcccaggtggatgctgggagtggtggcaggaagtggggtgtgatcagagagacaggaaaatgctcagagaaatgtgtgatagctcagataggtctcaaaccacaaggccctgtctacacatccagcacgattccttctggaacacagggagttaaagatgaaacaactctagaaactgaaaccaattatccatggcaatttattaaataactaaggtttctaggccttattaaaataaatgtttagtgtattttcttattctctgacattcagttctttacttgtcagcacctgctggcagcagctggagtaatcttaccaattttgccatatgtgcaaatcaatttgatttccgccccccccaaagatagaaatcagtaaagtgattaagttacaattaaggcatgtcattgaaagcccagataacatgaaaaggctgaggaggaatcagctggaggtcaccagtgatttccttccacccaggttaaatgattttcccccctcattctcctgcctgctctactgcatgtgacactgtggatgaatcaacaagcctcctcctacttctgggaagtctctcctttttctggcttccatcatgctttccatatgccaagttctcctcttgtcactcatactggccccctaactgttaatctgtctgtccatctatccaaccatccacccatccaatagatgtttaatgacccagtgtgtcatgcactgggaaaagtgacaaaggatatttatgtatggttttacagttaaaaaaatgcttttccatatattatttaattaaattcctgctacaaccatatgagggggctgttaggatccccattattttatatatgaggaaacaggctctgagaggatctgcaatttatttaaaacagcacagccagcaggtggcagggtctagacatgaattcaggttttcatcccattaagaattcctaatggtactctcctatatactggtgaggtataatttctcaactagcctcactgttcctaatgaaatgtcacgctccagctatcacgtattaactgagactatgttaggctctgagggatgcaaagactgagtccccatcctcacagagcttgtggctgagttgggaaggcagacattaaacatttctgttcacacaagaaatacttgttttcaacatataagggagagctcatctagttgtgaaaattaggggagtcttccagaaggaagtaatcattaagatgcagtctgaaggatgagtcagagttagctttggaaagcggggatgaaagaaaatcacatgtacagagggaaaagcatgtatgtgcaagggcctgtggcagaaagacccaatgtgctgaaattttgaaggccagcttgactggaatatagacaatgaaagggagcctggcacaggatgtggcccagaccacacaagactttgtagccatgataatgatttttacttttagcttaagagcaaagggaagccacaagtcaagagaatgacatgatgaactttgattttgattctgacttctgcgtgcagaatgaattgtagaggagcaagagtggaagcaggaacagctggaaggcttttgcagttgtccaggtgggaattgatggcagcttagaccagctttgtggtggtgaaaatgaagagaagaaccccacaggtaccccctgctctgctcaagcccatttccttactagatcctgacaccagagtgtgctcacgaatttgcagtgaatggaagcttgtccacacttcagggctctgctggagtctcctcttccaggaagccgtctccagacaatgccagtcctctgagatctttcagaagttgtacgtctcttctgcgttttccattctcacacctgatgcttctctatggcttggctgctctctggtccactcctggagatgccttcatttctcctgttgtcttgctttctccctttggaaagtaaatgctttgttggcatttgctgaatggtatcaacatggctcctttggaaattatatttgtaaatgattactcatgccaattgccatgtttccccctaaattaaacactggttgcttaaatgcgtcttcatgatcttgttctatcaaaatgtatgtcccaatttttccattacttcctctaaactcttttccatatttctcctagtagaaagcagtttcagggggaatggaatggcggtggggtgggggcaggagtgcaagacctgaattcctatacctttttaatggggtatttgattaatccttttcatgggcaccattattcatgccttgatagaatctcattttatagctcttaatacatggacccaatttatccacatcacattgtattctaatacttgtcatccaagttattagctatctccttctcagtgtaaaatcatcagtaagtttgattagcttattccctggggatgataggggagataagaacagacacagtacaatatgaccccaagggctctgcattctcaaaagaagactgctacatggaatccatttatggagccagggtggccaaaacaaacatccaccccatgggagggactctgtgcaacccaggagctgtagccatgaagggctgactgctgccattactggcaggactgagctatcatcctaagtgggattttaataaaaaatagtggggttcttccaccacctgcttaacactccctcccaatgactttcctgagaatcacagcccagaagcttctctttactccttgacacccttctgccttcaatccctgttcttttcctactgggcacctggcagggcggacaacctagaaggagatgcacagtgctgtgtactgctctttctccagcacagccttgggtctaagcctccagccctgtctttctcttctctggaaccaaatctgagccttgggactcataggtggctttgcttttgtaagcaaagtcactctttagcttgaaagagagaaggggcctgcacaacccctataggatggtaggctccaagcccatggagagtttctaatgccccttcccctacccaatcacctttcttcagcccaatcaggtgcatccctatggccccaatggctgcagccctcctcatctttacaccaaaggccctgtcaatgattcttgtgcttttctgagcctggcaagagtctcactgaggtgacactcttcctttccaaaggtggagcccaattcccttcctgcagtgtgtgggctggacttagagactgatttctaatgaacagaatagagtggatgtgacagcgtgtcctttctgagactaggccataaaaggcattttgactttctccctccctctcttgggttgttggctctcagggaagtcaactgctatgctgtgagcagggctgtggggaggcctaaggtactgagcaccaggaactgaggcctccagccaacagccatgtgagggagtcatcttaggagtgggtcctccaactccagttaagccttcagatgaaagcttgactgcagcctcatgagagactctgagccgaaccacacagctgagccactcccagatccctggcccacagaaactgtgcaagacaacacagatttgttgttctaagctgctaacgctggagtcatttgttatgcggcaacaggttactaacacactcttcctactttagggtaaggctctcgtcttctcctccccttcaattcccttcttaggttctattttcatctcttctctcttgaggatgtctggtatccctgttgccccctccactgacccatccctctgtgtccactcagtcctcacagtctcaaggactctttcccaagaagggggaatggaggagggaggagctccccaggacctgggtttgcaattccactcttgcctgccatccagagtgacatctggcattaggagaatgacttttttgcagagggcagtcttcctcaggccatgaggctgcctcttgtttttaaacctgggggcataataacttcagccaggcccacagccagcatgagaagactttgcaaacatcatgttcccctttgtatcatatgctcatctcctgtgccctttttgctcatctgcaatttctgcaaaaggtcatgtctcatttcagctttgccattaagtgcatttgacactaggtgggaattccaaaactggatgaagatgcaatctggcttaaatgctgcaaggtgggccgctatacttcaccccaaccagctgtgtcctgctagcatagacacccatgcaggaggtggcaatctgatagtcacttccttcataattatacatggggcaaaatgtagttttttttttgttgttgttgtttgtttgctttttttgagatggagtcttgctctgtcacccaggttggaatgcaatggcgtgttctcggttcactgcaacctccgcctctcgggttcaagtgattctcctgccctagcctcccaaggagctgggattacaggtgcccgccaccatgcccagctaatttttatatttttagtagagatggggtttcaccatgttggccaggctggtcttgaactcctgacctcaggtgatccacccgcctcagccttccaaattgctgagattacaggcatgagccatggtgcccggctgtagtttttaactaaaaacaaaaaaatccaggtagcttttccatctggtcaaatcctagtaatttttacaaaatcaatctcagtttaacggagcaaaatcagacagagatagatgtcaattttctagaaggcttggcaaagcttaaagaaaaaaaaaaaaccacaatggacctaagcagtggagtggaccccaaagcagtggttctcaaagtatagtcccagggccaacagcatcagcgtcatctggggacctgctagaaatgcacattctggggccccaacccagatctactgaatcagaaacttgggatgggggagccgcagttgattttaacaagccctccaggggattctgacacatgactacaagttgcgtatcactgacttaaaggattaaacatctaaatcattcattcagtcataagctattgactgaatacccactatttgtcagacatggtgaactctggggcaatgtggaggaatgagagggaatgtcttcctcaaggagttcacaatactctcttcccttgctttattacaaagcttgaaaagaatgcaggaatctgaagacataatccaaggaatggaaattattctttatatgtaacttttcaatggacaggaggcacatcaaaatttttttttccaggaacgatcatactctcaaaatagtaacctttctaaagtaagtaaatgtgtgggtttaatatatcatgtacagctggctcaggcttttaggcttaaaaaaaaaaagattatgagattccaccatgaatgaaatgcaggattatttcaaagattcacttaggcatctgtctgtcttaatgaacaaactattcagtgttaccatcttccttgaagtaggagttcttgccacctctcttaaaataagtctaggccgggcgtggtggctcacacctgtaatcccagcactttgggaggctgaggcaggtgatcacttgaggtcaggagttcgagacgagcctggccaacatggtgaaaccccgtctctactaaaaatacaaacattagccaggcatggtggggcatgcctgtaatcccagctactcaggaggctgaggcaggagaattgcttaaactcaggaggtggacgttgcagtgaccagaggtggcgccactgcactccagcctgggtcagaaaaaaaaaaaaaaccctctaaataagtcataacagctcatttgtattgtgtgctgggcttgggatatctgtattcattaactcatttgatccttccctgatcctacaaagtagatgctgatcctacaaagcagatgtagcaaacacatacagtctgcagatgaacagagtctgaaagaggcagaaacaggaacccagactcatctcttaaccccaggcaaatgatcctcctgtgctgtctctcatcccccttgggtcatcttgctgctcattaaactactaattgggaaaacataaaaggaaatactactctcccctaaaaggtttccagtatgaaatccccggctaaagcttaaactgtgggatttattttgaaattttaaagttcatgctagatttctccttcaataccatagataatgaagagctggctataaacttcttatggtcaccagcattagtagcctgtgtaagaatccgatccatgctcaacagatcctgcttggagacgatgctccacatttcctcctttctcaaggtgtctcaaagatgcttatggactcactgtaatactatcagagtagatgactttcctgtatctgggatgaacttgaactgatccagtcaagcctgggcccttgtgaccaaggatgtctagttaatctggcagctgtggggatgaagaatgtgacctatggccacagaagaaatcaaaactgtctggctagaccagaaacacactcaaccctttggcataggcaggaggtgtgccgaggggctgagctcattcgccacacaggcttatccttcatttacaaaggaatcgcaggtcaaccatgttttggcaactagatcaggagccctcttctgcctattgcatccttggacataatctggtggctttatcgatatataagcaacaaattcaaagtccacgtgggctgcgtaaaaaactctgaatgtatctctcaagccacttacagtgcgtgcaacgtgaaggaaactgaaatgtatgcacctttcccactgactttctgtaatcaagtctttttagcacaaaaagttcaacttccatctgtttttaagtcagggatgcttgttggtttgtgccgagacattgatttgattagtagcattctgtggaactacagacatgagatgttgagctcacaaacgtatgattcatttcggaattttgaaatgagaaatgcacctatcaatgacacagaagctgggagattctgagaaagcatttcatgcatataaatgggacatgtgatgaaaaaatatgcttatggttacaaccccgaagccagggaccaccccactgtgctctccaccctcgagaagtgacggctccaagggaaaccgctgggattagacgatcctgtgtttggacacccatatgctgcctcatttatctacctgtgacagggacagtgctggaagagaatcaaaagatgacaaattgcttctggttttaaaggagctgttcaggctgggtgtacacccagggggaaccagcttccgtgccaggagccatcacttcatcccagtctaaggccacattttggcaaacatcaaccagcagatgactgctgtctcctttcaccagtggattcaaagacgcttgctctgaaagcccgaaattcagtctttctgaagacgtgtgcagcagagagcagatctgcccacacactgcagtgaggcaggacggcgggcaggaagcaagggttccagatgacagggatttttcccgtgttgaggcagacagataacaggggaatgattttgcaggggaatgactccagagcagagaaagtataatatcagtaaatgaccctagaaaagactgatacaagtgaaataagtgcacaaaaatttccaagatgctggccactggaatccgcttttggggacacagaagcccccaagattccagctttcctgggggtagaagggaggcccaccgggagtttcaagagggtccacctgagcaaaacccggccctccataagcccctatactcgccagcccctggtccagccaaggccatgtatccatccagctacgatccttgctgcttctctcccgccatgcgtcctctctgggaatgactatgtaattcatggttaacccactcagtcctctggaggtgagctttcctcagccagtccagcttgtttcttctctgccatgtgctgaaattcacaaggccagagaagtgccttgctgtgtttaagtgtatagatgtctggtgttctcctacatgttgcagtcctatttacttattttatcctcctgacaacctctgagacaggtactattattacccccattttgagcttgatgaaattgaggcacagagagatgaggactggctgaaggtcatacagccagtgaatagcagagctaaggtcaagcccagatagcttggctccagggtctggctctttcagaacccctctgctgcctctccgatagaaagctccttgaaacccagcagctgcagcccatgtgggcactggcttgctcaggccttcctccttctccagtccacccctctggagttcgactggtactcagggctggagtgcagagcctgcagtgtgaaaagacagaggctcatctccaagccccttatttgtttctaaattcaggccagacgtctaaacgtttgttttgtgcttgttttgaacattccatcgtgatgcccaaggacgcttcatagatgatctctctgttctccttagtgagcatctggccccctctcctcaaacctcttgtctctgggaacactcttcctgccaccaactgatgttccctgcctaacctcattacacatttcagctaaaaatgcctattttccatgtggcagtgaggtataattatagcacaagttacatgccaaggcattttcaaatttatcatttctaataataaccttggtatataaccaccatacccattccatagatgggcaaacagaggtaggaggtcatagcaaggttgcaagggactcccaaattgccaggtcacttgagccacttgcatacaattctctctccagatcgctttctctcaacttcctattcaacaaacttatctgtggcctaggaatgagagacgttaacaggatcaagttgtatctgtgcctgtactccagctctcagaatactaacaagcgactctaagctttggtggcaaggttatcaatgcttagctttcagccaaaacccatcacgagtaggtttacatgcatgaaacatgtacttggagtttttggtctgcacagttctcttattacccattgtaactaatcagaatgctgaagggatttattcccagcatctgctgaaatgaccataacttttgttctgatagaatcttctggccaagcaatgaaagggtagactagaacctacaagaagacgagtaatcttccttcagagtcaaaatcgtaaaactggttttcaaatagttattgcagaaagcttgggtcctgagtaaggaagatagaagacagctagaggatgtattcattgcatgtaaatctagaattagaaactgtaaatgttggaagtttcataaaagtaaatttgcctcctgtactgggtgcatttttttgctgctctgtaagccttttccccccctggggtctctatccatggaaaatgcagttgtggggagtcaggaatcctgacttctagtcccagctctgcccctatcacttgtgtggcctcaggcaaatcactgaatttctttgagcttccaaatctgtgaaaccagtttccgccagtgtaccttactgagttgttatgaaaatgaaaatgagtgagctacaagagtgctttggaaacagcaagatactgtagaaatggaagatatttctataggcaaatgatcaagctcaaaaggcagtcgtgagtacagaagactctcaactgttttcagaggaatcatcttccagagacattgctgagaagtggcttctggaagcgtgaccatggaagcgtgaccatgccagtctacctcacggtattcaaaaacaggcgacggcacactattttgtgtgtttgctgtctctactcgtgttcgtgcttgactctcttatcccaccactcaggcaatgcttggcccatagtgggtgatcagaaatgtgagacaaattaaggaatgccagcctaagtattttagtcccccgagcacaggaagtttgttggtgggaaggaatgggggcgaagacgggaaatttctggaagcctgagtgtagggtgaccggctgactcaggcctaagggatttcccaggacaagatggtcattctacctggatgtcctatttgaatatccactttgcttcctcccagtcagcagggcatacagtatctgaagagaagactggtagaaggcataagtgtctctgagttcctgaagagtagatccctagggatttatagcctgggcattttcttttacctttttgtctccttagtttcaataggtggcatcatcttttcaccatcaggaatcccacagaatcatgccccttccatttttcctgcatcagattgtcacctctaagttattttcctgatccttgccagtggcgttctgccaccagctgaatcttctccctaacagctcgtggcattcggcgtaaaactgcagcctttagcaggacttgcatttggaattgttacaagtgctttgtgcaggcttcaccagaaacacgtgcactgcagaattgctgcctggatcaagatctgactggtgcatgtagcagggagatgacattttgggccagtgcagtgatgtgattagttggggatttcccctttaaaaacttacggcaaaagcctgcctgagacaattcaatattcataaatggaaagcatagatggcgtttctgctctgccaagagcaatagctatttatcatggcaaatgactgaaatagttgtacatacaatgctttactcagcgctgtaaattacagtatacagaagattaagcttaagcctaatgctacccttgagcttcaacagctgagtcctataaatggatacccgttaagaggagagaatctttttcctggttactacttaggagtgtatctctattaaaagcttgtcttaaacataaattaccaggaagcctgccccttaccccaggcagacttttcctcagggcattgactcacatgagtcacatctaaatgacacagtgacaggcctgagactataagtgtgtgctgtgctgacctcaagagggacagcagaggaaatgggggtggaggtggagggacttcacagagcactgaatgaccactcacttttagccagtctgatctgagcccaaggagggatggagagaccctgccagaccttaaggagacctttagaattaaaataatcctgaaccccaaccccttcaaagagaaagtttctttatctgttattctgtaagcatcaaggaaccatgacctagagctgaaacttaaatttcctagctaaattctattctccaagctcttgcttctcaaagtgggttctgtggaccaaaagcaccagcatcaccaaggatcatgttaaaaatacagacctgggctaggtgcagtggctcatgtctgtaatcccagaactttgggaggccgaggcaggcggatcacgaggtcaggagttcaagaccagcctgaccaacatggtgacatcccgtctctactaaaaatacaaaaatcagctgggtgtggtggtgggcacctgtaatcctagctattcaagaggctgaggcaggagaattgcttgaagccaggaggcagaggttgcagtgagccgagatcgcgccactgcactccagcctgggcgacagagcaagactccgtctctgataataataataataataataataataataataataatacagacctactgaattgaatcagaatctgcatttttacaagattttttggacgatgtatatgcacagtaaagttttgagaatcaaaggacagggaagcaggtgtcaagcagggaggaggagccccctgatgttctcactgaaaattatgacaaatgacaaatctgatttatgaaaataggtcctagtagtggatcataggattctgagttcccctttgtccaatcctacttcagaacactttcgggaacttgagagagagattatgagctgtgaatgaagtatcacttgaacttgagatgtgccccaaagcatctcagggtgtaaaacagtgaatcagccaaaagttcatgcttcacaaattaatcagggtgcctctaatcccctatgaattagtaggctgagaagcattgccagtgttttgggccatgatttcaattctttattgtaattaccagttgactgtaagtgggtaaagtatgcaaagatttttgtgttatctgagaagacagagattgtggataactttagtctttaaaaactaaagttctgtatgcatgttaaaaacgtaatggcaatcattaaacatatagattttagaaataaaatctattgtgaccaagataccagggggaaaaatggggacaggttaaggaaaattgtactaatctaatggaaggcagaaaaggagaacaaagaagcaaacaaaaagcaatgtaaacggaaatataaattagaagttagaaataagtccaaatatataaagtagttacaataattgtaaatggataaaactcacctattaaaagacaatatcagattggaattttttttttttttttttttttttttttgagacagagtctcgctctgtcgcccaggctgaagtgcagtggcacgatctcggcttactgcaacctctgcctccagggttcaagcgattctcctgcctcagcctcctgagtagctgggattacaggcacatgccaccacacctggcttatttttgtatttttagtggagatggggtttcaccatgttggccaggctggtcttgaactcctgacgtcaggtgatccgcctgcctaggcctcccaaagtgctgggattataggcatcagccactgtgcctggccagattggactttttaaaaagccagcgatatactgctttacaagagagacacctaaaacaaaatgacacagaaaagttgaaaataaaagattggaaagaaataaatgaggcaaatacatattgacccaaagaaaattgaatagcaatcttaatcagataaaatagaacctaaggcaaaagcattaataggcacaaagacaccactactaaaaagacctcacaattaagcttacatatacccaacaggacagcctcaaaattgtaaagcaaaaggtgtcagagttacaggagagactgacacacttagaattatcacaggagacttaaaactctcttcccagaaattacagagcaagcaaacaaaaaatggcaagaatgaataagatttaaacaaaataaacaatatatggaatactgtacacaagagagacattaaataaattttctaataatacatgatctaaattacaaaatatacaataaatatatggaactctgcccacaacagagagattatatacatttttcaatcacgtgagacatttacaaaagtggttcacatgctagctagtcacaaaggaagttatcatgaattataaaatggataacctataactaatgttctctgaccaccatcaattaaacaagaaatcaaaaataaaacaatagtaaggccactccctcaccatcctttacatctgaaaactaaaatcacattcctaaattaccatctggcagtggtgtggtttttttcctatgtgtggcctagttgctatgggactagttaatttacatgacaattatcaggggtatcacaagaagcaggaaactcccagaccattgtagcttcattattttctattttgaactaaactctaagccaaagggaaagtgaagcacctgattcccacaagacaagaagggcatgtgtgaattaattatgacctagtcatacggcactagaagctgctcttggtacattcccaggcccatgccctgcactgccacactatacccatctctttctgctcgccagtgctgggtggatgacgagactgtccttgaattgcccctgggacctgggaaaaggtgctatttaatggctgtggcaccttacaattaatgtcatcctggaatcgagaaaataccgtagttaactgtttgtaggggaccttctgtctgctctttcacttctgaaaaaggagtgggaaaggctaaacaggagacacagggggaagatataggcccaggtatctcaggaaaaatgagcacttccccctaaaaatccccccaatcaaaaccaaaaccagatggatagttcctccccaggatgtgctaccagtccaatgcaactccagtgccggctgaataatgaaacaaatacaaaaaagaaaccccctaacaacttaaaaaggatggaacgcaggatcgtggtaacattgatcaaatcacattgatggcaggcctacaagttgtgtagacaagtgagggtcggggagaagtggttaaaaaaaataaatgataggaccgtagttcttcagcctgcatgtggggcaccggggagggcaaaaagtccagtggtttcttggctcacaaacattacaagccacagaggagggcagctctggggtacaccctcttcctctggccaccccacttgtctcccaggctggctctgcactgccaccatcaccagtacccacctcaaagagcagctaaggcaaaggttggccataagggctagaagttcctcaccaccaaaccctagggacccatgggtttgttgtaagaatatgacaaaggcagctcagccaagaaagtgggaggaaaattttcaaagggccaccatctagcccctgccttcttaaacgcaccgggaaacttgattcatgtttttggagctagtgtcactatcaggatgatgcccagagctgacaaatgcaggtcacaggattagggtgtcagtcagagccagcaacccttttttttttttttttgagacagagtctccctctgtcactcaggctggagtgcagtggcacgatcttggctcactgaaacctccacctcccaggttcaagcgattctactgcctcagcctccctagtagctgagataacagatgtgtgctaccacacctggctaattttttgtatttttagtagagacggggttttgccatgttggccaggctggtctccaactcctgacctcaagtaatccacctgcctcagcctcccaaaatgctaagattacagtgtgaaccaccgcgcccggccccgcagccttctcattaataagaagagcactaccatatactcattaataatgagtattattaatgcgctttggttaagagggttgcctcatttaagaaggtgcttgtttaagaagattacatatggggtggaggcagccacttataaagatgagcagaaaaccacagccacaatgtaaactaagccattgttatcttaggaaaatgcacccctagagaaggcttcggaatttgagaaaataattcagggggagaaaagcaaagtatctatgacgctaataaacaaacaaataacagaaaccaaatcttaagacatctgtagttccagcatggtaaaacaaagacaatggttgctttctctggaaaaaaaaaagattattttttccaggtaaagtgggattcatcatagtgaaatggtttactgactctttcatcctttatgccccccaatttatgttttgccctagacctatctatttcctatgagtctcctatgcagcattcccaaatttgcacccagttttcagaagcgcctggccctgcaaaggagcaagggaaaggtcctacccaaacaatcaacggtattccccgattctaggatgccattaattgtgagatgtaacattagtttaacagcacctttttctggggaggggggaacccagaaagaaagcctggcaaagtagctctacacatcatgggaagaagcactgcgggtttagaaaagatatagcttggaagtatctttagagatttgtagcatctgggggcaagcctgcacacaggtttctagcatgtgacactccaggaaggagtcagtaactctccgtgatcccagatgaagacataagaatcggctccttgagaatactccgagggcctccctaaagaaaattgatgcagaatgctgcagcttacatgggattgggttctagtgtcagggtgggaggcgaaaatcctgtaggacaaaaactcctcttgaaagagtacagtacacgtagtatgtgggacagtgggcccttcccatggccagtttctcctccagagttgggaaacatctttgtttctttgctcagacaccagacgaaagggtgagctagtgtctaggcccacgttcttaggaaaaacatgcagttttgttgttcttgttgcccactgcatgtggctgaatttggatgagggcgatgtgactccaatgtgaaatagatgcatttttgtttttgactccaagacctcttggcgctttaatgtgctaatagctgctatgaggctctgggagggggagtctggcacagtttcccaagggtatgcatctacccaaacccttgttcttcgtatgggctcactgttccagagaaagcactgtttgggagatgcttctctgcttatggctcaggatagggagaattccgagatgaccttttgaatcagcgctgctaacattctttactcagatttaaatacaggaatgtttgttacccgaattctcctcggtggatacagctctgaggaatggaatggagcagcctgtatggcaaggacacaccagtgatgagtcagaagccaggggtcacgttacagcgagagccctccagcaatcagctgtggtcagggatcaaagccatggcctccccactgctcacagagggatgcctttccaactgcgtctcaacagagttggtcattctctttcaagcagccatgtcttccaaatgattgtacttgcttacatgtggaatttggcttattcataattggtgagccaatttcccttccttgctggcttccttccttctttcttccaagattcttttttttttaagaaaaacaaacaaacaaacaaccccccccccaaaacaaacaaacaaacaaaaaacagtatattgggcatcaacttttgagatccagcactccttgtgtggactcagggaattgaatggtgagcctgacaggggtccttgttccttgagagtgtgagaggggggaggggtggataagtacataagaatttgcaccagccaccatatatgctaatattggtgaagcagaaggtgccaacagcacttgaatttgggattggaggagtgcttccttctgcctgtttatccacctgtttatcccagacacttttttttttgagacataatcctgctctgtcacctaggctggaatgcagtggcacaatcttggctcactgtaatctctgcctgccaggttcaagcgattctcgtgcctcagcctcctgagtagctgggattataggcacgtgccaccatgcctggataacttttgtatttttagtagagctggggttttaccatgttggccaggctggtctggaactcttgacctcaggtgatctacccaccttggcctatcccagacacttctgagtgtctactagaagccaggaaaagtgctccctggtgggactcagcgatgcccaaggaacagtcctagccttcaggaactcactgtctagtgttcacagtgactcttctgcacagtaatcagtgctataggtcacagagatgcagagggcaaaggagccagctgacgattgagttgggtggcagctaagcccagcatacatgccaataaaacactgagggtactgccagcctaaaaatggtgcctgttggtgaagcaaaaatgaagtcatctgtccttggaaaaaaatctcaagacacaaataaaatcacctattgtcaattggctattgtcaaggccaacaaccctcaggttgctaacttagcgacctcttctctttagtgtcttactcaacctcttggcatttgacatgatctatgaaacgctttcttctcttggcttccgtgtagtcattctctgctgctttttctgccaagtcactggccattctccttcaacctaactctaaataaatgttgactcttccctttccaatctaatccaatccattctgtcagcaaattctgtcagctacatttccaaaatagatctcgagtttatccttttctctccatctccacggctaccacgatgatctgttaccgctagctatgcattagctccttccgggtctcctgggctccactgcagccagagtgagcttcagaaaacagaaaccagattatgcctttccctcactcaataccccccagtgtcttagcaccacacgtagagtaaaacccaaccttcagactctgttctacatgactctgacattctggtccttgtctactactctgaagccctcaaatgtgccttgtttgtttttactcttctgtgttctctgctgggacactcttgtgacagcttttcacatggcttgatcatgtatttgtttatgttatttaacctaccagaacataagcctcaagaagccaggcccttatttgtcttgttcactaatgcatctgcagcattagaacagtgcctggcatatagcaggtgctcaataaatatttttcaaataaacaaatgaattgaaaccatgtgactctggagaatgtaatccaagacattcagccttcaagaaataggctttgatgagataataagtagaagattgtttcaattaaaaatgaattctggctgaatgtggtggctcatacctgtagtcccagaactttgggaggctgaggcaggaggatcgcttgagcccaggagtttgagaccagcctgggcaacatggcgaaacccgcatctctacaaaaaaaaaaaaaaaaattagccagacatggtggcttatgcctgtggtcccagctactcgggaggctaaggtgggaggatcacctgagcctgggaagttgaggttgcagtgggcagtgatcatgccactgcactccagcttgggcaacagaggaagaccctatctcaaaaaaaaaaaaaaaaaaaaaaaaacaaagactaaataatcctaaagttatgaagatcctattaatttatttctaaatttgaactgaaccattatatctgctgtgtgcttatttgcaacatttctactcgattcacagaaacatgaaaaaagagaatttcactgaatggaggaaatttatctactctttgtgagtctcatggatctgctcatttgttggggataaacaagaaactacaggtagaatttttaggagaacatatgtggtacccactccatctcttctacaagcttccttctttttgctttcatgtatttaaaggtctatttcaaatgctgtggttaaggctctaaacacattccctattaccaatttatttctccttctcccttacctcaaaattgtgttcaagttctctgcctatgccaataagcagagaagatcagtggtgtggattaaaatgagaaagagcaatgaagctcacctgccccaagcacctgttatttacttttcagcatcctacaggggatggaaatgacttttctgcatcaaagtttagttatggtattgcagcgagtttgagacacaaaacatataactgatgtagtagttaaggcactctggagtcagacattggaattctggttctgccagttacatcagcctgatcttgaacaaatttcttaagtcctccgggtctccctttccttgagtgtgagataaagataacacgaccagatatcaccttagggtgatggcatgattaaataacacattaaaatgtttagcacatagtaagtgctcagtaagtgttttagctttattgctgttatttttatcctgcattaggggagtgaaaagtgggaccaggtcaacctgctatgttctggacccagcattaactttaatttgagcagtagcaagtccaaaatataaaaacttgaagtgaagcaaaacatggtcctacttagtcgtagattctctcggttgtaatgcttgatttatgggataatccttcgttaatcagtcattctgtcatttctttcctttgagattttcctagggtccatcataaggatttccttagcatctatagtgtaactgcactttactagggatggtggaaaaatgaaataagcaaaaacaatagcagacattgtttctgatcataaggaactcaaaagatgatatcaataccaggagttaattctggatttgggaaagactgatcaaattcaagttaaaaaaattctactggtgaaataaagtttgcacagattcctgtgctcttgccaagtcttattaattaatgttatcaaacgacaaagaatatgttcaatgagaataatttcctttattttatacttctgatgttaaaaaaatctagtcatataaaagacaactaacaataacagtaacaacaatttaatgtcagcaaacaaatctaacttaattgacaaaaaaacccaagccccacgcaatggcaatcaacaccttcagaaaggaagtcttggcgggataattagcaggtgataatgcccctgacactctgagaagcccagggggcactgacatcaggagggactaactctctctagggctcagaggcacacatggtttgtctcttcctcaaccagaggtcacctggagatagacaaaataaaaagaacaattgcagggaaccttggatcctcatgatttaggctcccatgtgtagcactgctgagacatgctgttctcagtatccaaccagcatcagcatctggatgtacacagaaggatggggtgccagccaggacatgccatgcctcactccaggggtgagtttctgccacttatttatttttctgctcagcctctctgctttagctcacagttcattaaattctactgcatcaccatcaacatgaaaaacagctacttgaagggcattcaaaaatataatcagaaaagggaataaaaagccctctctgagaaggaggaaaaaaaatctaatcctctcttgtctattgaatgacatccaggttctctggttctaaaccatttttttttttttaagtagcagtgacatccaaggattatctctgtctgatgggcggggtgtgcagccgtatggccttctgctgagaggactagtgccaagtgtggcagacaaattctgtgggatctgtgtacatgaaggtgttatttcttttgcctttaaaaaaaaattattttgaagtggaaaggactgcaattttatggactgctgtaagataacttgttttacactttgcatgtatgtgtgatggggaaataattccaatggctagctctgtgcaagctgaaggagtcaactttctacatgcggctgtgattccacagaagtcatttctgggcataaacacatattttactttgataaaaaatttaaatacagaaaagcatgaaatacagtataataaacaggggcatgttatattttacggcagtagttcccaactgggggcgattttgcaccctaggggctattggcaatgtcccgagatggttttggttgtcaagattaggagtggggtagagactgctattgctatccagtaggtagaggtcagagaagccactcaacatcttatagtaagacacagaatgagccccacagcaaagaattattcagcccaaaatgtccacagtgcccatgctgagaaaccctgctttactgtaggtagttatgtaactatattagaagataaggaccccccaaaaaatcctacttctttcatttaggcaaatcagacaactcaccataaacgttcaccccaattacaaaactacaacctggatctacctattatttttttctttaattacaatagtccaaattgactgaaaatacacaattactaaaaagtaataaaaaatttttttccagtataggcaccttgcacctccttgtttttgtcttacatacatgcctgtgcacacacacagagcatcatcctctgccctgtccctggattctctctgggctgaggtaaggacccaccacagctctgacaagacgaagagtcacaaacatctccttttccacagtaatcacaagtgaaaactctggacaagatttcattataaatctctgtagcttatccctcagttaataattgtgaaactttttttttaaagcaaactttgttgtaccactgtgctttccacatgcaagttcctttaatcaacatgaaactttatgagataaactattatttccattttaatacggaaacagaaacacagaggcaaagtaacctgcccaaggtcacacagggaataaggtgcagagctggaattttttttatttttattttttgagacagggagggtcttgctccattgcccaggctgaagtgcaggggcacaatctcagctcactgcaccctccacctcccaggctcaagcaatcctcccatgtcagcctcccaagtagctggagcacaacactacgcctggctaatatttttgtatttttggtaaagatggggtttctccatgttgcctaggctggtctcgaactcctgagttcagggtgatctgcccatctcggcctcccaaagtgctgggattacagatgtgagccactgcgcctggcctagagctggaattttaatctatcaaatgggtcctagagaggttacactcaaccactaggctcacacgccatgtcaatgcatcaaattgggatggacagctacgagggacagagatgcctgcagagtggaactgggactcccaaggtaaggcttcttgtttctgtttccccctttctacaactattcctaaataagcttatccattcacctaagggactttagaaacaaactaatcccttgaaatcctagatctcgtggggagaagtttaaaaagtgtctaaaaggctgttggtacagacttaggaaacagaccctaggaagccatccctaatggggtgacacagaacgtggctccaagagcactccacttccatgccaggcaaagggtctccccagcagtggttgcacctgctttctacatctgggatgccagcatggggcacacgatcaggagcagaaggactgtggccagccctgggcggggggctccatgtcacccctgtaggacgctatggcacaggctggatggacctcggcagggaacgcagagagatactggagcttcacggcatttctaaaagagctgccataggggcctaatgtgaatgtaaaccaatatttgcaaagccaagccctcaggactcctagcaaatgtaatcatattcaggccagcatttcttgcctccaagagtgtgggaagcaaaagatgaatcacaggcgaaagtctgtgggctgacctcagcgtgcacatcctctgagacagggcaagaaatgaaggcaggaagcacttgactgaattggttttcccatttttcataagaaacattcaacttaataaaaaatagccacaatttattgacaatcctttctttattcccttaccatgtgccagaaaacgatacaacctttttctgtgttcttcacaggaactctgcaaagcaggaattgccatccttattttatagacgaggaaaagaaggctcagaaggtcatataagtagctcaaggtcaaacagcccgtaaatgttaggattctaacctgcctctgtttgactccaaaattcatgacttttccactatgacattctatttttcacactggtgctgtgatattgtgatataataggaaacatatatttggtctttatccccagtttctggcacagagctcctaaaacccttgtaacttcctgagtgacaggggtgataggaatatctttcattgtattggtcttagtcctcagtttcctgacacaagagcttctcagacccttgggatctctggagtgtctttttatgctaatgagatgactggtggctggcgtacataggcagtttcaggctgggggccggtcaccagaaagaccaattggagattgagccaatcaccaatggccaatgatttaaccaatcatgcatggaacctccaaaaaaccctaaaggatggagtttaaagagattccagatgggtacacacatccacatgctgggagggtggtgaaccccaactccacacagggacagacgctcctgcacttaggactcttccagacctcaccctattatctctgactgttcatttatatcctttataatataaataaaccagtaaacattagtaaaatgtttccttgagttctgtgagttgttatagccaattattgaacataaggaggggtgtggagacccctaatttgtagccaagtcagacagaaatgtgggtaacctggggacctattacttgtgactggcatctgaagtggggacacagttttgtgggactgagcctttaacctgtggggtctgtgctaactctgggtagtgtttttttggttcatgtttttttgagacagggtctcactctgttacccagggtggagtgcagtggcaccatcatagctcactgcaacctcaacctcctgggctcaagtgattctcctacctcagcatcctgagtagctgggacaacaggcacatgccaacatgcctggctaatttttaaatatttttgtagagatgtggtttcaccatgttccccagaatggtcttgaactcttgggctcaagcaaccctccctcccttggcctcccaaaatgttgggattataggtgtaagccactgcgcccggccccagctacaggtagttattgtcggaactgaattaaatcgtaggacactgaattggtacctgcagagaatccccttggtatggaaaactcacaatttggtatcagaaatgttgagtaagcaacagttttcctttaaccacaaatttctgaagtccccataactgactggctaaacacacacacacacacacacacacttttttcaatttaagttaaatgactagtataccaagatcttgaacactgccatgcacccatgggagaagcgggaggtggcacacatgacagcatggcaggaggggaagtggcacaggagaacagagttttgtggctgttcagcacgaagaactgcatccagctgggggcgatggggaaagacgccatggagagaagggaagagaaaatgaaccttaagcctcacatcagtcacatcatcccagcaaccccctgaggcaggcagagtacccattttacagatgaagaaatggaggtgaagagggatgaggtgagctgctcaaggttgcacagttagtgggggagtcgtgaattgctttgtctcattccaaagcccatgctgtctcctctacatcaacaaagttcaaataatgttctgtggagccctggcaggtggggggtgaaaaaagttaggagaaggctgcgtccatggggcttggacccctgccccaattttaacctcaacagctctgcttcccatatatatttatggattggggttttatataagattccatttgaaagaaagtttggcagttaaccacagggtgttggcctgtgcccaaaatcagacctcgggcaaagcactgacctcctaagccttagcttcctcaattacaaaatgggtataacattaacacccatgtcacagggctgttgaaaagattacatgctcaaagcgatggaggctgggcacgatggctcatgcctgtaatcccagcactttgggaggccaaggtaggcagatcacctgaggtcaggagtttaagaccagcctggccaacatggcaaaaccccgtctttactaaaaatacaaaaattagccaagtgtggtggcgggcacctgtagttccagctactctggaggctgaggccggagaattttttgaactggggaggcagaggttgcagtgagctgagattataccactgcactacagtctggatgacagtctgactcaaaaaaaaacaaaacccaaaagacaaaacgaaacaaataacagatatggaaagcacttggcacagtgtctggcactcggcacactggcattcttattaacttgtggaaaatagcaaggccagtgctacaaggaaagagaaaaaaaaaagaatattgctatggactgaatgtttgcgtccctcgcaaattcctatgttgaaatcctacccgcaatgtgatggtatacggagttggggcctttggagataattaggtcatgagagtggagcccccatgaaggggattagtgcccatataagagacctcagagaactcttgttctctttccaccatgtgaggacacagtgagaagctggaagtctgcaacctggaagacagtcctcgccagaatctgaccttgttggcatcctgacctcagacttccaccctccagaactgtgagaaatacatttctgctgtttataagccacctagtctatgatactgttatagcagcctgaactgacttagacaatcatgaagctattgcaggaatttttagggacactaaaaagtactccccacaaagagctacaatggttctaacctctgctttgcactctctgggtcttgataaatgtaagtttgtatttgtactaggacacacacctagagctgagggaggccttggtgcctcaatttgctgagttgtgatcatgtccccattgctgcttgtcagcttgttcagcaagaagcttaacggagactgggctttgagggacgagatcagtaaccccaaacccccaaactaatttactgcattgctcagagctcccaaagccatgggctgtcccctaagctgactcttggctcatatgccaagagccccagggttgggggaggcaggtgtatcagctctgctaaacaccagagcctcctcccttggcaatctgggacctttcccctgggaagaactctgcaggggacagcggggtcccatgttttgggtccctttcaggatccttccatcaaagactccagtgaattaagctctcagtgaagattttttgggtttcgttttgttttattgtttgtttctcttgagacagggtcttgctctgttgcccagaatggagtacaatggcacaatcatagctcacagcaacctcgaactgctgggctcaagcagttctccccctctgcctctccagtagctgagacttacaggtataccaccacacctggctaaattttttttttaagaaatggggtctcactatgttgcccaggctggtctcaaactcttggcctcaagtgatcctcctgccttggcctcctaaagtgctcggattataagtgtaagccattgaacccagtcccagtgaaagttttgatggcttacaatagaatgcaaccccttgttccgtgcctataacagctgcacatccttgtgaattgagtgaatgaaaatcatattcaggatgatgtagcctctgcgttctcacaagacgcacagaagcactggtcacggagcttctatgcctggtcactgaaccactggctgggtgggaccttcttgccatggctctgctttggattctccacctgtcatctcagctggtggtaccagctgacagtttctctttggagaggtttaaccctttctctcttccaggcagtggagagggtcatttggtacagagcactaggcaagaaggtcaacttgtgccaggcacacgacttgctcctttcctgctcagtctgccagaatgaacatgtcagagctggacacacccacagaagtcatcttcccatggtagggacaaggaaaccaaagccctgagacatcaagcaagtagcccgaggacacagtgctggctgcagggaggggcagaagacttggcctctgaccaaacctcctcctatagcgctttctagggcccttgctttgccttgtgctggtttgaaagtcctggactcactcccagaggtgctccgtaagcctgaattctacacattacaaacacaaaatatgcctacagtatatacacagatacagattatatatatgtagatatgtatatatcatatacatacatatacacgtgtttgcagttgataatttgtatatagagagactgttaaagagcttggataagctcaactccctttattttattatagaataatgataactgaagaggtggggaaaagtcagaaattcggaacgtgagaaaggggaaatgtgcgtaatttgcaaaagcatattcaatattataattgctttgactttttttaggcacaatagaatgtacttcgaaaccttaatggtaaggagggcattcagattttatgttcatcaaaagggaatacagcttaaataaaaagattgggagatactgtgctggactcacagcatattacagctttggaaattgtctaatccaattccctgctatagataaggaaacttccacccagagaggttaagtgacttctagtctaaggccaaatggctgtttattcatccccggggtggggcagccacgtggactttatctgttctgtccatggtttgttgatgaccaactgaaggaatttattacatcaaggatgtttagagacggaaagcagttcccaaccccacctgggattttttttaacaaggaggattcttgggaaaggtgaattggaatgtaaggttttactgatgcaccatttccttggggcagcaccccagtgggccacacactgggctgtgcttggccgcagccctcctttttgtaagtctcggggagactctctcctgaccctctttcagggggagaaaatgtctggctgcaggagcgactccttaagcagctctcccctcccctggtcacctgcagaggccatcgctaggctgggcagatggcttcagtctagtcccatcgaccgagacaagttgcaggttttctctcatttgttctgacaggactgcggatttcagcagaaggactacagctcctaaaacagcctgcgagcagaggcagcagcccaggaagactttacccacagcctcaggctgagacaagacatggcgagaccctgtcggggagcccaggggaaggcgactgtccccagggcggcagctgcagatgtggccgacggtgcaggggtccacttaccgcagtgcgactggaaaacctgtggcttgacgacctggttacaggcactgcacactacgagatagaagtcgtcatgtgctgggtaatggccaaataagtgcatatctgtgggggaaatgaaaacaagtgtgttttgaaaaagcaattaagtctcagaaggtgtacagtttcctcttggaatttcttcaaggacagtttttcaaacacaacacgcagaaaggcaataatctttactaacgggaactcggtttgtcataaggcaactccccgcctcttagagaagcaagtgcttcagagaatccctccttatttctcccctggaaatgcactgcggctgctcctgattcagtctgtggtgtcgaggggctgctctgagtcacatgctatgggaatcaccctgtcctgagagaacccacatgttagctgggattcacacactgaggctctatatagctcaggatgcggggaactcccccaaacccattcctgcataagcagcggtccctcagggaagtgagaggtgtctggctggggacagaagaagtcatttggcctcggcagtgcctgggtttccccatcacttgagggacatgctaaggctgaaggagtctgctgaagaagtggctcatttgctgccatcattacccattattcattcagtaaatatttactgagtgcctgaatgtgccaggcactgtgctaggtgctgggaaaaactggggaacaagaatgagttctctgctctcctggagcttaagggagcagaagagagaagcattaggcagaccaccacacaagtcatcattgcctgcagctgtgttaggggctatggaggagacacacggggtcccctgggagtgtgcggcaggtggccctaacctagtgtgaggcagaggagaatgcttccctgaggagggggcaggtcatctgagactccaggatgagtagaggttaaggaagcaaagggccaggcagggggaaggcggaaagtttgaagctgaagccaaggaaggaggctctgtgcatggagggagtcttggcgcctcttggctggaacagaacaggggaaacagcagggtgaggctggccaggcccagaagccatgaaccttccatgcccaggtgaggattttgactctgactttaagaacaatgagaagtactggggctttttaagcaaagaagtgacgggatcaggtgcatactgttaaaagatcagttacgtggcaatacctccgagacaatgaacacatatgtacatggatgttcacagcagcattactcagaatagccaaaaagtggaaacaacccaaacacccaccaattgacgagtggataaacaaaataccacagaacattatccatccactgaaaggaataagtactgatccggtctacagtgtggataaacctagaaaatattaggctaaatgaagagaggcagacacaaaaggtcacatattgaatgaccccatttatatgaaatgtccagaataggcaaatctataaacacaaaaaggaggtaagtgcttgccttgggttggggggcctggaggaattcgagggtgactgctaacaggtatagagtttctttttgggtcaatgaaaatgttctaagatcgatagtgatgacagtcacataactctgagaacagactaaaacccactgaactgtacactttaaatggtgaactgtagagtatgtgaattatatctcagctgggtgtggtggcttacacctgtaatcccagcactttgggaggtaggatgatcaagaccagcctggaaaacgaagtgagacccccatctctacgaaaaatgtacaaaaatcagccgggtgaggtgacttgtgcctgtagtctcagctactcagggggctaaggtaggagagttgcttgagtccaagaggtcaaggctgcagtgagccatgatcacaccactgcactccagcctgggcaacagagtgagaccctgtctcagaaagaaaaagaaaaagaaaaaaattatctatctatctatctatctatctatctatctatctatctatctatcatctatctactatctatctactatctatctatctatctatctatctatctatctatctatctatctgacaaaaaaaggtcagttataggaaacccatggtcacatcttgtgcaccatcgggtggagacagggctctggcaggcacctccgcactgcctccttttagctgactggctttgagagggcagccatgaacactggcaggggtgatacaggaattaaacctcctctggttgagaacccccacaagccttcatctgctaggttcaacctgtgtctttaatgaaacccctcaaacacgatggttcccctgaccacgatcctaggccagaagaggggaaggttcaaacccaacagacacctaagggaggcccccaggctctgtgctgcattcccagagcagccctgctgcttcaagggaaatggaactgacaggtttatcataggcaaggggtgaggcccccacttgccctgaaggaagcctatgattgaaagagtggaccaggcctgcctggaggcaggtgactcacactgtaggggcctccccaggtttcaggtgcccgaggtggctgcttgcctcatggagggtgaccaggacacaggcccaactgtattttaaagggtgtggccagtcatccccctcatctctccctactgccacttctaagactggcacacactgtcttctgggagttgctggaggggagcgttattagtcagggcctggtaggcaggcgggaggcctgtgggaagagaggctgagacaagagcccgaacctgggcccagccaacaccctgtgggcaggcaggaccctcagttcagagccttagagccgcggagatgacccttcttgggccttaactgttgacacagctctcgatttgcttttaatttacaggttatttttgtaacatatattcattttttaaaaataaaacaaaagggatccaagttctccgaagatacatttgaaaaaatacagaaaacctagaagaaattaaagaaaaataccattaccagaaaactttattaacacttcgcatctcatttcgacttaaagtcacattttatatccaggaacaggtaaaaccaggagctgatgagggctacaacttatttatttattcaataagcatttatatggctgcctgacatcctttctgcaacaggtcaagctatgaaggaatataaggtgatattaaaaattaaaacaacaacagcaacaaaccaaaccaagcattaacaaaaatttcttgaacatctactcttgtgccagaaactgccgagtgctgggaggctgagaccagacattggagggtgtggggaatttgtccctgcacctttgtcttacatgctgggtgacctgtcgaggcctgtcaggctgccactgacgccccattcttctgtattcctccagagacctgcagagcccatcccgtctcccccacccccacagtcacacacatctgttatgtcagtgagcggaaggtaaaggttcggctccttagagactgtggccacctggaggtgtgttcccctccaggcctttcccgttgagacttttcctagtttccctagagggaagtgtcaaccttgtacgtgtctgatctgagcatgtctcctgtggaaagtgagaggacctgggaatctgcttgattattcctcagtgagtcaaccttaggatctcctctacaggctgcccaggtcctgagggccctgccgatggcgagcaaagacaggcagctggctcccaggaagaccaccacttcacacggctgggtgttcacaggcactgtgctgttccattagagcaatgcgggctgggggacaaagcagggagggagggcagggagagaggagaactaatgacaggcataatgctaggcactctgctaattaattctctttccttccctctctctctaatttacccccaagcaaaacgttcggtgcacagttaaaaacagtggtgagctgaagtgggctgataccagcttgtgagagccaatcatacatgtcgttttccaatttcatgtttagtgtcgtcatggcagtagcttgaaatcagccatggtggaagtatttacaccaaggaaatgggcaaacactacaaatcaggctttttgtttttcttttgttaaatatttactggtacaccactgaataaaaacgggcaaaaaagtgaagagtgaaaccacctgtaatgccaccacctagtgataaccactgttgacatattaatatatatctctccagatttgtgatgtgataacgttatcttagttaatcttcataatgaacctgcaaaattgtcaacatctccactttccaggcaaggcaactatagtaaagtaatttgcttgcaatctcacagcagtgatttgtaaaaagtagcatgagattcccggatactctgactctaaagccatttctcttttctcagcaaaatgcttcttacgtagaacaacatcccatttcacagataagaaaaccagtttggaagggcttcctggatgactaacaggctgtcctgaggctctgaaggggctgttggcctgggcactggcctggggtcagaaggtgaggttgggagcagagggctcattgctgagcctttcctagggtgagtgtcctcatctctgaaaatggctaacagtctctgcttcatggggttgctgtgatgactcctacacactgcttggccttgtacctttttccaggagggactcaggagagagtgtggagaaagctttcatcattacctctcttatttttaaaagttcactagttccctccaacacagagtccttgctcctaaggactctcccccatgacatttcacagcagacttaggaaggctgatccctctgactgcagaacttcatgtgtgtgtatgtgcacatgtgtacacatgtggacagaggaaggctgagagccactgggaggcatctctaggctgtggctgaatgccaagaaaacatgtgcccaatgaagacggaactttgtccaaacacaatgtacaaccatctcccaaagagacaaagccagacctgtctgctttgccctgttttgtcaccacaaatggataaactgtggattagatagagtgctagcaccaccacagcattatcacagagtgatctggtcaccccctggcctgatcacaggcagggaggaggcaactccattaactccatctttcagatgagaaaacagaggtacattggcttctgggtcaatatttttagtttttgaccccaacccgctatagacatgtagtcatccatccatctatccatctttccatccacccacccaccccacccatccatccacctatccatccacccatccatccatccatcatccatcattgaaacatgtggtgtacacgctgatattttctgttgttctattcatttcttcttattttactctattctatttcatttaaaaaatgctcattcagctccctaaattaagttcaggactgttcaatgggttacaactcaaagtttgaaaaacacgcttcaaggcactgtagtgagaggctgagcagaatctgagagttaagttgggatttaaagtggtctgagctggtcctcagtggtcatccaagagcctgaagccagaaactgaatcattaatgccattatgctgcagccagctagtaccagctcacaagagctgaaaatgtgcaattcttcccaactctgcattcagtgatgccatgttggtagcttgaatcagccaaggtgggagtatttacacgatggaaatcggcatccactacaaaccaggacttcttcccgcagagagctggttgttaaaacatttacaccagcacttcgctgactagtgtccccttctagcatcactgcttcctggctcgatttctccagctataaaatggaaaattatattcatcatgtaccatactgggacgcagacaggttttatgaactgaactgaaatggaaatcattatattaatttaaaattatggttaccgcatcaattattgacctaagaacttatgcccaacagagccaggtaaacaagttgatcacctcctgtgtcaaatgaggctataaattgtcatgggtggggtgggggatggggaattaggttactggagttctttccaatgtctattgacttaatgcttactcattaaagattattcaggagattactcacagatcaggcttgtagcattaaatcaggtctgcttataaatttatcacactcttctcagtgcctctgtttcgagcaagcagccctccacttcccttactgaacttctggtacaattcccattcatggcagagtccatcacattcacgttatcagcttggtctggcactcagcctgcttcccaatagcactgaggttctcccaggcctctgtccactctcacagccttcctcccgctgaaatctgcttctcacacccccaggtggcagaggagggagggatggaacagaactcagttgtgacgtaaggagacacaaagtttgggacaacagaatggttcctacaaaagtaaagtactaactgacttcccagtgtagttggtaaagtgcttctgaagtcaacactgaaaaagaaactggcagcatgggagcagcgttttattccagataaacagccttctagagagaacacttttgacaagcaaagtcatgtgtttataaactttagtttatatccaatattcacttttgaaaatggttacagttaaggaaaaggcagggtgacatctccaattctctatttacacaggacttgtttctaagatgggaagacagctggttttgtggattcaggatcaagctagatgctgcgtgcctttgaatttgcccctggataccttccaaggctcgagactttgacattatgaagcaacaactggtgagagctcaaatgatgaaaaccttaagagagactaaataaggcttgattcctcccttttgcaagcaggaattccaggtgaagcaccagatgtacagagaagctgcaagaagcagacactactttgaaggcagtcggacagcctattggcaatcagtgatatctacgctcaccatagagaatcccacggtcggaaaaaagaagacagcaaaacagacaaccttaaattctagtttcttggaaaaaataacacagctcctgaaaatggccttagatttcagggttgtgaaactacctcagtcgctataggaattacaaaaatgtcaagatggcatacgctataatgctatagctattaacataattttatataatttaaacattatgcttttcattttaacttactctaaaaggtactgtaatgaaaaaaattggggctgtatttatgttaatttaaacattccaagctctttccaggaaggtagatgtgagctctacctaaaaagtaagtcttagctgggcgtggtggctcacgcctgtaatcccagcactttgggaggccgaggcgggcagatcatgaggtcaagaaattgagaccatcttggctaacacagtgaaatcccatccctactaaaaatacaaccattaggtgggcgtggtcgtgcgcacctgtagtcccagctacttgggaggctgaggcaggagaatagcttgaaccgtgaggcggagcttgcagtgaacagagatcgcgccactgtaatccagcctggcaacacagcaagactctgtctcaaaaataaataaataaattaattaattaagtctctgctcactgggaggtaactggacccacagatctcggtaggacctacggatgtgacaaacctgtgacaatggccagaggaccaggtgctattgatcttccttggaaaactatcaaaaagctgtgctggtggctgacagtggttttgatctgtgggcttctgcttacatgaactcagacaggccaaattcctgagaagaacagcaactgtagttcaaggatatgtgattcactccaagcagattcaaatctggacatagaatggctggtcctaagagtcttcctttcccctaataatctttatgcacttattatactgtatttattaatttttctttttgctatcagagttttcagttgcattttaatcacttaacggtgcatggaaagcttaaggcaatatacaaagatgtttctcctttgctctgacagaatgattttatttgttccccaattctaaaatctccttaaattcatagaacaaaacaagttggtgtctgaaaatgacctcagactcgacatctcctacttccccagcagaatgttgagctcccctctaggaaaatgtgatcactttctgtttctcagatctctggaaaccaagggctccattgtgagagattcaaaatcagtgaaatctgcaaagggaaaatgaaggaagagaactagaaaagcaagcagcagcggtgagctctccagcatcactccagcatcaaggggagtgagcgtgcgggtgcgtgcaggcggcagcagcaaagcttttcttcttttgcaaaccaatggctaaaatgactcctggcctcttcctgccacggctaggctggaaggcatcccctccctggctacagcccagagccgggcctggtagcaggtcagtgctgagaaacacaaggggcaggtggaagctcctcattaggctgcatgaacaggatgtccgcccccggaccccaaccccaaccacccaacaaaacatgaccacacaagacagtctcagccccacttcctcaggagaaggacctttaaagaccagcattcaagatgtatggaggcgaaggggctgcactgggtccccaggatgcttccttaggcctcaggtctcgcccagagttgagaacaaaaactattagagatgggccttaaaaatgcagtgcctgcttgctgagccctggagtttggaagcccaagttcaaatttggcatttggcttataatcttctctaagcttgtgtttccacacatggaattagatgacttatttgtgaagaggctggcacacagaagggatataaaaaatagaacatgttattatctgtggccttcttctcatctctcccactcacctggcctctcctcagggaagcctccctctcccctcctggtgcgccctcactcggcaaagcccggcagctttcctaaggctgttgtggagtggctggtttatgtctctgactctcaccagacggcaatcttccggaagacaggaattgtgacttatcgcccttcctatctccatagtcaaacagtctggcatgtggtagctgcttaatcaatggtaatatgttaactaggctgaggttcccaagaagttgatttattttccatactcattcattttctcttctctcgaaaggggaagtagtaaatgataataaattgccctaatatccatgctgctatctaagattacgaggtcaataattgtctctatttattcactctttgagctccttggaagataagcactaagggaatctaaggcatgatccaggtgagccgtcagtggagaagtggtctattcctgtgcccaccatgccaagtgcatgaaagctgttccttccccccaccccatggcaaacacagctactctgcactcaacaaggcccccttcagagccagtgtttgggatgggcttgggtgttttttggatgctctctctggtcccattttctacttcctgactttgggctgccattgacatccagactgtgtgtgatcctgggcctggaagatctagacttctccctccccttcctgtctcagctctgcactgtctgacactgggccagcatgcagggggctaactgagggcacatgttggcaatctgagcccaacctggcagagatctcactgattggctagacagtgatgaccttggtagccaagagaataactgtgcaaagggctccccttggcctatgcctgccttaggctcatgcatatcttcatcttccccaccctatcattcacagttccattcacagtaggagctaagtagaagtcttacttgaagatctccttgtaggcaactgaattcagccttctctctgacatttaagtagactttggaataaaaaaatagctaccctgaagtataatgaagaacttgatgtccgccatattgcttcttgagattcacatgctgagaggcttttcttctatttggatgaaaaaaagataggaatcccaggcaaagaaatggggtggatgatcagttgtatgtgggagctaaaacgctgtattaagggctctcatagctccgctaagactagaacaatgatgagaaacgcagttctcactaggtcttctattactgtttagagattttaatttagaaatggaccaaatagcctcaggaggggccaggcagcagcatccatctaccacagacagagatgcaccacctgtcccaacacagcattctgagagatttcttggataacacgttgcaggactacactggaagagagtccataaagaagccctcctgcggtgccttacatgtgcaggaatgtgacatttgtaaaggcacaaggagaggcctttgccagtgggactgcatcgcagcaggcctcagctgtcaagctattactacaaatgtcatccagaacatgtgatggagaccacatgaaaatgcccactccagaaaattcccccatcgtgttgcacacaccaacccctgctcagtggtaggggggttatatcagtgttctgcttgaagattcagagatgaagaagagacacactgctcggaatccctgagactagagttcaggaatgacaggcaatcccacggctgatggtcttaatgggtcctactggccatggtgggcgagagacctctgatcctgtggcacttgttagtgtttccaagaggaaagcagaagttggttctggctgtgactgatctctaactggcaaagcaattgcgacatttttttttctccctatggaacgcctttagtcaaggctattggatccccacaagcccctcaagattacaataatcgcccaaacgatgctgccagagctcagaggtaaatgtgctcacttcgaggtcagtgtccacttgggagagccagaaaacagtggaaaggaactgtgtaatgtccctgggaatcggtgttcaaagcactccagccactgggacagccagactacaggaagctgctgacagatatcccaaggcattctcccaggaatgggtgcttataaagggaaccagaaccactccagctggactggctaccgactgcaccaatgctgccgagggacagaaataaacttttgctgtaagggaacagaaagaagcactggggcatctcagcacatctgggcccctcaagccagtcgtatgtgcctggaagaccactttgaaggtgctggggcctaaagcacaagggcacaggaattaaaactcccccatagaagagctacagaaagttgttttaaggtaatggaaaataagatcgatcagctagaggagaaaaatcacaatgtccttaatcacaagtcaagcatgaaactagttatgggccaaagaaaaaagggacactgttggcaagattcatgaagccctgtgattgggccccaatccctgggttcccagcttcagtttccaccaaatcctctttcactgctgcccatccccgactcttccctccatacttgccaaaatcctgtgtatccttcaaggtccagcttggtgtagcctccttcagggagccttcttcaattcccgcagaaacaacaaacactttctctgtatttgcacgctcctctgcatcttagtgctgcacttagcccactctgtctggtgtttaaagatagtggtggatacggctgtctttcccatttgtacactgttttatatacagactcagacatttatcagtcaaaagtgaagactgccagaaacgtactcaaatgcttaaaaaagcaccaatgaatcaaagctgccttagactaaagaaccacacaggaaacttagctgggcagctgtggggtagtggaatgagcaacaaattcctgttctgcctccagttggctgtgcaacacagggcaagccacagaacatctctggatctcccttccctcttccagaaaacagtgtcttacctcccctgtaaggttgctgctaggattaaatgagataacttatgccagtgatagcatcttataggtattcaattaaatgctcaagaaatttagctgaattttagcctgaattcgctaagtaaaaagccaaagaccctcaaaggaacactattttacagaggcagccgtgttttgcttagaatgcaggttctggagtcagatcgcctgaacttgaattctagcaccacctacttgggaaatttctctgggcctcagtttcctcatctgcaaaatggggtggtaataatagggtagttgtcagaataagatgggataacacatgtctgatgtctgatacttgggatgctgtcaatacatatcatttagaatcagattttgcatggtgggatttaaaaaaacagagcaaaacagttagtatgaagtttcactggagcaaaacagttagtatgaggaataaaatcactgttaaaagtcaccagaccttgaacttccaggcttctaaaccacagggtgagcaaacagtagatgagggcttctcaaagtatgaatacgacctgtaactttcttgccaaacacagatgactagaccccatctcagatctaggaaatcagattctctggggtatggagtcgagcagaatgctttttaagcaagctcctcaagggatctgatagctcctaaacttagccaatcattgtcctatcatgatcactactaaagtggagacacccgctgatatattccagtattaatgtggtaatatggaacttcttgctagttaaaagattctgttagctaaggggaaagagtgttctgtacatgtagggatactgagggtacacctggcacatggttcagtttgcccctctgaatcacctctacttgtgagctctttggatatatgcgttggaggcccatgagctcagtggtgtgctggagccgaatggaactgctcatgacagccaattgtgcacatcttttcccaacttcatatttacagacttcacattggtagtttgaaattggcacagtgggagtagttacaccttgaaaattggcaaacactacaaatcaaggcttttacatttcttcagagagccagtgtattggcacaccactggttctcattcataataaaattctgtgcaggaacccaaactcgacggaatgtggcccacggcattaaatttaggtccggggaaggtttggggtcacttaaagcctggtgtctgaaaaccttcctaagatgctaatgatgttctagcattttaatctgcatagcttggctcaagagaaaacttcccttgtgctctgtggtcatcctctaaaccccagccttgggccaaccacctagcaaactgcagtcttgatacccaagtggaacgagtcaaggcatagacgcttcagggtcaatccttcatcaccattagaaaagcaacctgttctcccgagggctgcccagtggcctccatacctcagtaaaccgatctataatatgtggacggcgcagaggtccgacaatcaatctctcatctctgggttcagaggtaaggtggtctagctaagcatcagcccccagtccccagcctgctgttcagacacccccagctgccttttaaaaggtcacccataaggagccgtaagccctgcagttggccctgtttcagcagataccactggggaaacacagacctttcctttaaattcctcccctcagcagtcaggtgagtcagggaaaattcaatccaatttcccagcaaatcctactatgctctggaaggacatggtttgaaaaatctatttttgtgcttttatttacttaaggtctgcatgcctgaggaagttttttcatagtgccatcaaactgcttcttgcttaccaggaaaaacaaagatcccacctttctgtaacaccaccagcccagccacagaatccagaggaactgcagctccaggcccttgattcccagcagcagaaggctcactccagcaccctgcacagcagcctggctctagcgtggggctttcccctccctgggctgcccagggctcacacagttttgtttttcctggtttaaatgaagtttctgattcagaggcatgacctgtctctatggggtttgtgtctgtgattccagcagcttcgtagtgtaaactgctggggtcagggctgggtatctctggatggtcccatctttctagaagggtcaaatgcccacatgagaaaacaaaaccccttcaatctattcaggacttggagttgtctgtattggtaaacttagactttgtcccacatctactttctacccctgtgtcaaatccgtcagccagccaacttcaactgagactcttaacaggactcaatgcaacacacgggcttcactctccacctgcccagcagtggtgggttgtagagtggcccctacattgccatgggaggccagggagggcagtgggccgaagcagagggcatccatgcatccacaccacagggctctgaaagaaatggccaagggcccttcttctctgccctagctctttctcagctcccctgggagcgtggcctgctgggaccccatgagtcagtgctcccctgctggccccaccctgatgtccaggatcctatctagtggagggacggctccagccctggctgctgtgagaaggtggcaggacttgagcagtatcctcggtgctctgggcctttatcactaacttttcaaggcatgagacctctctggggccctagaacaccttccacctttactgctgagataaggcagcgggacaggttaatgggtccatacctaactgtgcattggaatctttcaggagctcttaggggacagatgactgggttccagccagcctgactgaactggaaattctggatatgcttccattgcaagaatctgcattttggaacaaagttttccaggtaactttgatgtagctgttcaacccggcactggcctagacttccctaatggtaacttcccataggaacagtctatgattttacctatttccacccagttatgaactggaacagggaaggctcaggggtgagaatcatgtgcttgatttgcctctccagtgatcagagatgggactataatactgtcccctctctgaggcggctaagtggtccaggaaggaaccctccacaggtaagggactgagagctgtgttcaatagggtttgtgtccctgtcccctccctgactctcagtgggcaggacttctaccagccttggccagagggagagaaatgggcatcccttagccaggatgcctccacctggccaagctccagaggctagaatggggtgcccagcttcctttctggcctttgagcagagtcttcctggatgccctgtcaggtccctcagggtgtcttcccagaaaagcccttcaagacaggtgatagccatgctgagaccaaatcaaaccaggaaagcaaaccctaaactctgatatgaatagaggggaagggtctagctgtcttgcttccaaaaaggcctgattaagaagggactcctgagactggctgtccccgacatgtgcatgtatgggtgaagagccagcataacccaccctgccccaaggtaaggttcagaacatgggctgtgttcacaagaaggaagctcttgttggagatgagtggaaacatcttagggaaaattagcctctcattccaactaacaaggaaggggaagcatttcagggtagccctagaaataaatttatatgctcgcctgacagttctacaaacacttattctatgtgttgggtgctggcctggggctagactatgatagacccttaaggagaagatttattgataaaataatattattgaaaaaacatcaatcacagcagccggcatttattgagtatttactccacgttaggtactgtgctaagtgctgttcattgattgtttcattgaatcctcacagcagacctgcaggggtgacattatctccattttatagataaggaaatagaagctcaaagaggttaagctattggctcccagtctcacagtttgggaatgctggagccaaaatctgaactcaaggctgctggatcttaactcttaggatgttgtacctttttaaagaggacggcagctgggagaaagggagacaggcaggcagggaagtaacaagaactctgaggtcagttatgaataaacacccgtggcgtagcatttaccaaatgtccaagaaccaataaagaacagaagctcctgtctacaatgaggatcagctaggatgacaacatacacacttaaaacaacgaacgagccggacagtagagtgagctgatgtagtgaagggctaacctgagccagacagttagagaatgggatggcataaagtgacatgattaaacaggcagaaagggcaaagtgtgctagaggagggagccatgagctctggctaaggtgccaagggctttctctataaccggccttcctgggggcaggcgagaacttgccagggcccttagtgctgtggggtgggaaggagaacgccagctgctccaggacttggtaagttggatatgcaggaagttcagggggctggcagctagtggcacttgtgccagtggggaacctggggtgactcagtgtgggaaacaggaggttgttggtctcacccactgccctcatctactcactcatttatccaacacttatttattgtcattgattatatgccagacactggggtacagagaaatgaatgcgatgatttatgccctcaaggagctcacagatcatgaaaagagacagggcgagactcacaagcccacagtacacttggcaagtgataaataggacgtgtgcgtggctcatgctgcggcagagggcagggagagcttcaccaggatgaccccagagtcggttcctgaaagatgagcacaagcttccaggcagtcgcagggggaggggcagcccgggtcgtgggaacagcaagagcaaatgcagtgtggtgagatgtgctggcctggtgagggtgccacaggtgggtgaatatagcagggaatgaggatgctggggggaagggcaggagataaggccagagaggtgcgaggcagagttttaccatgtgctcatgagtatgagagagagaatgcagagagcagtgatcgggtgtttgttttggaagcaatgctgagcttgctggaacaaggctggaggtgagagggctgctgcagggtctggggctgcagggacagagaggacgcaggacccaagagacatttatttggaactgaccactgtgggaaatgacttagagctttctggcttggcctaccaggaagaggggaagacagatgggaatgcaggttacatggtgctagagactgaactgcgtccccctggattcatgtactgagaccctagcacccagtgaggtggtataaggagatgggacctttggggaatgatgaggtttacatggggacctaaaagtggagctccatgatgggattagtgcccttgtaaggaaaggaagagacaccagggccctctctgcccagtgagcacccgtccactcaccatgcgggcaccctgatcgtgggtgtcagcctccaaaattgtgagaaataaacctcagttgtttaagccacccaggctatggtactttcttatagcagcccgagcagactgaggacatatggggaggagagctttgttttgcagcctactaagtgtgagaaactgatctgcagtccaagaggcaagctggggccagagagacagagtggggacatcatgagcaagcgggggccaagctggggttgtgcacagtctccctgtgaaacagtgttgtctgacaacagggttaaggctagaatttggggaacaccaataaataacaagaagatgagaggagggaaggggccagtgaaggaagctgagaggaacgctcgcagagggaggaggtgagtcatgaggaagtgcccaggaggacccagcaacagagtcagaggcacagagaagccacgtgggaagcactgcagtgttcaacacctctgacaaggagtgaaagctctggggaaaaaatagggtgtggaagtcaactggcagttgctgtggggggatgtacaaccaagaaagggtgacttacttgtttcaattttaaacaacaaatatgtgaacagggctttagtctgcaagaagccagcagagccttcttttcccttttgccatcttcacctggcctcctgggccagggcacgctgccatccaggtgtccagccaagcttcctgtgcatggatgaccacctgttgccccaggatttggcactgtccaacttcccagcatagctgcctttctgctgccccaccacaatgccagctacattgggtgctgaccacatgccacacaccctgctccacaaacatcagttagtgtcctgaagaacctcatgagggaaacttgaccagacccagcttagaggtgaagaacccaggctttagaaaagtcaagtcacctgcctgatgtcatactgctggtaaatgctgtgcagaatttgaacactgtgtgtcaaactccactgcacttccctgcctcaaaagagcctttcatttcttccttgaaagagctgccccacactgacacaaacccatgcagggcgagaacaggacacaccttctgacgcggcactcctgggtaggctgttgcaggaatggccccccagttgtttataccttccaatcttcacacccttgggttcccccttttcacattgattctgggctcagtcacatgacttactttggccaacagaccattagcaactgtgacagacacttataaaatacttatgcactgggtttgtgtgccctctcttgttctccttggaaccctcatgtggaaagcccgggctgggctgcagtagcatggacggacccacatggagcacaggtgagctgttcctgcccagacctctccagaccgagcagcctcccaaccaccagacaggtgagggagggcctctttgaccatccagcctgggctgcgctatccgcaccagaagaaacacccagaagacccacagaatcatagtaagtaatgtttactgtcttaagccatcaagttttggggtggtttgttgcacagcaaaagctagctaactgatacaagtccttaaagaggcctgagctagcatctccttccagctctgaagcactggaggataattcttggatctctagtgtccacagactctttctgcaatgtcagaaccacccaagaatacagcactgtccttggcctggagggtcactctgctcctagaaagcaggaaaaggaagaggcctttatataccttctccccaggacacacagggcctgcaggcagccctggtgggtgccaggttacttagggacaaggtgacagtggcatgcttttgccatttgtccccagccaagtgtttttccactgatgtgaaaggaaaaagataatttctctagtgagccctactgcaaagactctgaggcagcatttcatcaaagggtgctgggaagcactggggagacagcaaaacccaaaaacctccagctccactcagcaaggagcttgctgcttctgtttccagagaggcggaaaaatgaatgagcactcaggaaagccaacctgatcagtggcactttgataagatgacaaaattgctccctcctccagtccaaatccactctctgtggtgaactattatgggaaggaagcatcaactaattagaagcatctctgggacatgagaaaaatcagcacctaaaatgcctaagcagagagaattccttgttaagaagagagaaaacaaaacaaaaaactgctaggatgtcactttgcccaagcatatttataaagggaggaggagataagaattaattgggacaggagcttctacctaagtgacataaaagacacaattatttttgctgcttttacagatcaagtgccccttccaggtggggatagagccctggcaccacccaccattttgaaaaatgacttttagtcttccgtagttctaactaagcttgaaattaagatggttcttttgtttactccccctgttggggaagctctaaccacctatcaaaaacaccaatgtctggattatttatttctcattgtccaacctacggggcatagaagagttttatgaagccaacatgtgaggcgtttctcccaaagaagcgtggatgcacctccccatattgcagagcccttttatactatggtcctttgataatctggattttgacagacagaactaatgcctgacttggagcaggacaaagagccctggaagtcagaggcttcattcttgtcaccctctttcctttataagctgcgagcacttgggtaagtcccttaaccttgagaaaattcaataaaacaaagggttagtgactaatatattacatcctttttaaaaaacaagttgtggtttaaaaagccccatataacatgagatctactgtcttaacacatctgtgagtgtatagtacagtattgttaaccataagcacactgttgtaaagcagatctctagaactgactcagcttgcactactgaaactccacgcccactgagcagcaacctcacttcctccttcctccggcccctggcactcaaccattctatgttctgcttctacgagtcaactgccttagatacctcatatcagtggaatcaggcagtattggtcctttatgactggcttatttcatttagcatagtgtcctcaaggttcaaatatatatccttacaatgatactgacatggtactcactgtttccatggtaagtggttacatatattaacgtatttagccctcacagaaacccttcaaggtaaggtggcatgattatctccttttgatagatgaggaaactgaggcaaagggaggtgaagtgaggtgcctatgcttacctgctgtgtaagtggctccagactcctttttttttttttccaagacagggtctcactctgttgcccaggctagagcatagttatgctatcatagctcactgtagctttgacctcctgggctcaagtgatcctcccaactcagcctcccaagtagctgggacgaaaggcacatgccaccacatccacctaattttttaaattttttgtagagacgaggtctcactatgttgcccaggctggcctcgaattccaggactcaaatgatcctccagccttggcctcccaaagtgttgagactacaggtgtgagccaccacacccagcccagactccattctcttgaacataacaccatgttctttctgtacagtttaaaatttctattttagcaagtaggctcacagagatactgaagtcactgaggaagatggcaaaagatggggcagggaggataaacgagatgtggtgttggagagatctacccttgtatagttcagagtggtctttcacagcaggaagaggatggccttggagccagggagacctgggcccagtcctggctctcccttgctctaggcccttgggaaacaccagtcaccaaaactggcaagacccttgccttgtagacatcacatgctagcaggtgagacaaacaacaaacaataagtattcccaataatgtctgctatagaaagggtaaagtgttataaaaaaacaaacaaacaaaacactggtgctgggaaggctggctggaattgtaaaaagggtgccactgagaaggtgatatctgagcagactagaagaaggtgagaaggtagattgtgaggctggagcacatctaggggatggtgttccgcacagagggaagagctagtgcaaaggtccagagaaggggagagcctaggacgtatgagggagagcaaagaagccagcctgtgtgcaggagccaacgcgagccagcgtagaggcactgaagccggggatggcatgggggcggcggaaaggctgtgccagtgactctgagtggtgtgggaagctatgcaggcttttgagcagaggagtgacatgaactgatacttggcttttatagtaatttaggtgatggtggctcagatcagggcagcagaagtggaggtgggagaagcagttggttttgaacctaacctgtttcctagtggactagatgtggatgggagaaaaagatgggagtcaaggatgacaccaagagttctgtccaaagcaactggaagaatgaagtggctatcagctaacctagaaaggccacagatgaagaaagttacggggtccctgaaaagatatggtgaagtcctatccccaatacttgtgaatgtggtcttatttggaaacagcgtctctgcagaagtgatcaagttaagatgaggtcattagggtgggccttaatccaatatgactggcgtccttatacgacgaggagaagagacacagacaggcctggagatgatgtgaaggtggacagggagaacaccatgtgataaaggaggcagagccgggagtgacacagctataagacatggaaagccaaggatggctagccacaccggaagcatgcaacagattctgccctggaagcttcagagagagcgcagccctgccagcaccttgactttggactttggtctccagaacagagagagaatgaatttctgttattttaagccatctagtttgtggtactttgttgcggcagccctagcaaactattacagggggtaagctaacaattcagttttccacatgttaaatgctggagatgtcaagcaggtggtgggatgtctgagtcccaagttcaggagaaaagcccaggctgctgacaggagtctgggacatgtctgcaaatagaatgcatttatagccatggggctggatgagggcagcaaggaataaaagtatacatgggaagggaagagggccaaggattgagcctggggcactccaaagctgagactgggagaagcagaaactggcaaaggactctgagttggagcagcccaggaggtagaagaaaaaccaagagtgccaagtcctggggcctgcatttcttccctggccccatggctcctggtgggccaaggcctccctgctgacctacctgcagccacctctcctcttcccctcacaggctaagtcccagagagcccactgaacagaccactctcaactgcccccataccttgtcttcagacaaattgtctcctctgccagcttcccctttcccttctgttttctgggtctcagcctaagagctcccctgccttgtgaatgctttggaccaccccaggcacagggaggcaccctgctcccttctcaagcccccctggatgctaaccttgcctcaaccttagtgctcatctcctatcccggggttgatggggatgtctgtctctgtacacaaccagctccctggcacagagcaggcctgcaataagcatttgttgaaactgatgaatccaaacatggatggctgaaatgggactcttctggcagctaccgtattaacactaagtttggagtcaacgaaaacatatgaactttaaaagcaaggtttcttaagttatatctttcctacctgttcagttgatttccaagtctcaagaatagtagtttacatatattcctgttaaacttttagttcttgagagatctaactcagactagcaagatatttgggtcttgattctatcagtttctaaactagttttcaggcttagctttctgttctccacaaactttactgagcatatcatcaatgtctttactcgagtccttaatacgaaacaaagcaggacaggggcaggaaagaagcctgtaacatttccctgcagttgtccctctggctcagttacggcccactcactgtacagatatttactaagcacccactgtggcattgttctaggtgtcaggaattcatcagtgataaacaaagatctagctgggcatggtggctcacgcctgtaatcccagcactctgggaggctgagacgggtgggtcacttgagcccagaagttcaagaccagcctggacaacatgatgaaaccctgtctctagaaaaaacacaaaaatttatctgggcatggtggcacacacctgtggtcctagctacttgggaggctgaggtgggaggaatatctaagcctgggaggtcaaggctgcagttggctgtgattgcgcccctgtactccagcctgggtgacagagtgagaccctgtctcaaaaacaagacaaaaccaaaccaaaccaaaccaaacaaccccaccaccaaaacaaagatccttgctctgacttctccacagataccgcctttcaactgttatgaatttacctacttgtatgacttcatgtggattccatcttttccacatacatttcatgacagacttttgccaaatgctttgttaaaaccagagacactgtatctataatatttcctggcctcccagcccaggagaaaaggagatgggatttctctggtgtacacagttcttagtaaacccaggttggctcctggtgttcactaccttcttttctagtattcacaatctacaatttttttttttttttttttgagacggagttttgctcttgttgcccaggctggagtgcaatggcacaatctcagttcaatgcaacctctgcctcccaggttcaagcgattctcctgcctcagcctccctagtagctgggattataggcatgtgccaccacgcccagctaattttgtatttttagtagagacggggtttctccatgttggtcaggctagtctcgaactcccgacctcaggtgatccacccgcctcggcctctcaaagtgctgggattacaggcatgagccactgtgctcggcccacaatctataattttaataatgcacactagactcttcctttatctgtaaattctgaaattaagttttttttccttttctggaaaccagaaaatcatttggccactttctgttttctgggaactctccttttctctctgactctgctaagcttaccaaaagcaattctatctctctctctctttttttcccccagtatcctaggatgtcattatctgaacctgaattctgaacttgagatagctgggtgttttctgataatttctccatgtatcctggattccaatttcctcccaccagtatgagtcccacccttccaagtctcaaatctttctttttaatgcccctctagcctcaatcctttcttcctctcttcctccatttcaccttacacaaaagctgtccttccagaggagacgtcgtcctcaggaaatcagtctaataaaaccagcttcgcagcagtccccattctctgtagggtcccacatctatcaggtgctcagaccctgcccttcaggatgtatcctctctacctggggaccatccagtgttttctcttactcggcctccaattgtgatcgcaatgccagcagctgtgctgatggccccctgaaattgacttggcaattcactatcctcactccagtgagcttctaaaaactcaataaacttgatctttgccccgcctcctgccacttgaagctttggtggcaatgatgatggtgatgatgatgatgaagatgttgaagaaggggatggggagaagggagagaaactatcaattcagtgttttccagcagggttttttttttccaggttgtatgtctgaggaatatgaaagctaggatgcccatatacattagcataaatattggattatatttacatattttaggttattcataggtactttatgattacttgactttcaggcagttgctttttgtttttagtttttttcttctacttcttaattccttcctcattacacaggcttgttgactccaatgcttagaaatcctttaaaatacaagtgaggaagaatcatgtatgagaaaggaaggaagaagagtcagaaaggggattgacagagttgcaaaatacttgcagaatttaaaagataacattttaagttgtctctcactcctcatggctaaacattcagaaaagatacagaaaatctcatgtacaaataaattctttaaataagaagagaatgttctgaatggcttcctcctggggctttgtatttattacttggtttcacagaaattgccagtctagaacaatcagttcgtaggactgttacaaaagatcatttactagaaacatataagaaatggaactgctgctaagacaggatggggggcagtggatgggactagtcctttctggaaaggggggcccacaatgctctcctattcctctatccccatgtcagttttgcctcttcagggaaaagatgtgaaatcactcttacacgtatataaaggtgttcatttcctctctctcagacgttctgaaaactgcttacttgtgcctgaagaaccaggtattatggagcgaagagggggagaagtaccaggtgcaagaccatctgagagtcagaaatcattgaaatctcacatttgcattttgtgcttggctctaggaaaaggtatgtacactgcaggctgactttctaccttattattaagagttgtgtgattttgaaacccctaactgttctacattgagatcacttagcttttttaaaaaatgataaagaggatatctcataaacttccagagagaaaaacaggttgcatcaaggactcagaatggcactgggcttttcattagtaacactggaagctggaaggcagtgaagtgttagcttcaaaagttggaggggaaattatcttcagctgaaaactctatacccaactaaccattattcagactgagggaaggacaaaggcactttcagacccacatggcgtcaaaaactttgcctcccaggcactctttctcaggaagctgtcagaggatgtactctcccctaaaatggacaaactaaaaagtaggaagaaataggtccaagaaaaacagggatctaagcctcagaggcacagcaaaaggaaatccctgcatgatgctcggcagcttgcctagggaatcacaagtctaggctggagcaggaggtggaagattcgggagctggggaccgagagttcacaggatgcttgtgagcgtttggcagatgccactggtaggcatttaggagaatgtgcaatgggcatctcatagacaaagcggtcttttaaaggcaattattaaaagaaaaacaaaaagttatgtaagaaaggaaacctaatcccagtacactggttggctccctagtgaataatatttaaatcaccatcatactgtaaacactgaccatgaattttgcctacctgtatagctgtactgggaggatggggaggagaagtgagggtgggtggtacaagagggccaaattcttctaacgggaagtcagtaggcagtgtttaaaaccaataaatcaggaacgcagtctaagcatctaatttagaggggttaataccagaaaaaataacaaaaagattttaaagaggttgttctggggagagggtctgggggctggggagagtctgagaagggcactagctgaattttaaactggttttagaaaactctgagagaaaacaatttaatgaggaatgcactgccttgaaactgaaatttttatagacactagcttttaataggcgaaatggggtgacagagcaacttaaaatgagaggttagggtggaggaggagaaagaggaagtattacaaaattcttagtgtgaaatggttcagattcagaacctataaatgtgattttcgtgctgctgaaaacttccaagcacagcactcttgcaatgctcctttccccacagccctcagggaaggggcccagcagccaagaagtttcccaacatcgctgccaccttcaccatacctgttcctggcccaagtggaggccccagtgggaaatgtgtgtgctgtctcacctccagctgggagctggaatgctctggaaggttcgttcctatgcaggacaagccaagaactctaaggagttctaagctaagttctctaagccaagaaccctgcagagtgcagggagcacggtgagatgcagctgatgacagctgtcacaaacactgaccactgaatttagaaaacagggggaaacaggcatgggtcacttatcagtaatttaccccagcaggtggggttcatggtgaaagtcagtcaaggaaaggaagctcagcaaagaggatacaaaggatattttatttagcggagagcttctcctcctctcaagggccgtagacataaaaaagcaacattttcccatcggaccaggaaagtgttaaattatactggtgtttactctctcatttccaaggcctgggagcaggatgggatatttatttttattatctctctgatgtgtttagagtccctaatgagggcagaaagtaaacaaacatttgattgaaaacagagatgtcaatatgcaccctctacctattgttgatacaggagaaagcaatttcaataagattgaaacaattagacttgaagattgctgtatgcaaaccacatgaaaatggaagcctactgctcagtgtgtagaaaaaaataaaccactgtctgttggtggttttttcttctgattatattaaagtaaatgcttgcatgttatatttactgaagttgaaaactgtactgaggttatgtaagagaatattcctattcttaggacacatacactgaagtaattggtaaaataccacgaagaatgtaacttgccctcaaatggtttagaaaaatattacgtgtgactattgaaaatatatctggatcggtctgtctctctcccattccctacccccaagaaacagaaggacaaagcaaatggagcaaaatgttaacaacagttgggccaggggcaatggctcacacctataatcccagcactttgggaggctgaggctggagcaacatttgaggctgggaattcgagatcagcctgtgcaacacagcgagaccgctatctctaaaaaataagaaataaaataaaaaattagctgatgcagtggtacacacttgcagtttcagctactccggaggctgaggtggaagaattgcttgagccaggagttccaggttacggtgagttatcactgcacccctgcattctagcctgggcaacagagcaagaccctgtttcaataaataaatgttgaatttgggtaaaggctatagaatgttctttgtgctattcttatttttgatgtttttggaaattagaaattatttccaaataaggagttaaaaataatataaaatcaaatgaagctgtaagaaaatcactgaggtttcacaagcattccaaaagcattctggtgagtgctggataccagactctcaatgtaacaagctgcctgggctaaaatccttgtcttttcaaattaaaaaaaaatttttttttgagatggggggtctcattctgttgcccaggctggagtgcagtggagagatctcagatcactgcaacctctgcctcccaggcttaagcaatcctcctgcctcagcctcctgagtggctggggctacaggcacgtgccaccacgccccagctaatttttgtattttttgtagggatggggttttgccatgctggccagggatcctcatgggatcctcccacctcggcctcccaaagtgctgggattacagcatgtgagcccccatgtccagctccttgtcttttgaaatagatttagaaccagtaaaacaggcttagaatgttcaaagtgaaagaaaacgactctttcagggtttaactctgtaatggcccaaattcaaggctgaatgatcagctgccctaacacagctttgtttaaaagaaaggaaccatctagctgacttaccaaattaagataattcagaaaaggaagtccccaaaagtttgggcactactgggtaagtctgcagcctccaaagatgcagcacacattgaagctggcatgtattaggataaagctgcataaaaatgcataatgtacccaggggaaatcctttaccgaaaaactggggtaccagaaccactcaggaccccaaaacactgcagctagaaaagattatgactctatcccttgttgttaaacacatggggacagctaatctacccactgcatttttttttttttttaagttctagggtacatgtgcacaatgtacaggtttgatataggtatacatgtgccatgttggtttgatgcacccgtcaactcatcatttacattaggtatttctcctaatgctatccctcccccagccccccacccccggagagaccccggtgtgtgacgttccccaccctgtgtccaagtgatctcattgttcaattcccaactatgagtgagaacctgcggtgtttggttttctgtccttgtgatagtttgctgagaatgatggtttcctacccactggatttaaatttggtttttaaatttcaggatcaaagttaatcttgcacagaggggataagtcactgggaggggttcacaaatggcatcttggtaacccttcaaagagtgatagcctcatacgagtttgtacatttgttttatgaagctttctgtatctgggttggctattaaaaaaaaatctgtatatgctggatatttaacaataaaaaatttaaaattagagcaaagcaaaatgcattaacttgtatttgggatttaaaaaaaaaaaaaaaaagagtgtcctttcccagggggctgctgaagatggcggaggggcaggtcctggtgcttgatggtcgaggccatctcctgggccgcctggcggccatcgtggctaagtaggtactgctgggccggaaggtggaggtcgtacgctgtgagggcatcatcatttctggccatttctacagatacaagttgaagtacctggtcttcctccgcaagcagatgaacaccaacccttcccgaggcccctaccacttccgggcctctagccgcaccttccggctgacctcgaggcatgttgccccacaagacaaagcaaggccgggccgccctggagcgcctcaaggtgtttgacggcatcccaccgccctatgacatgaaaaagcggatggtggttcctgctgccctcaaggtcatgcatctgaagcctacaagaaactttgcctacgtggggcgcctggctcacgaggtttgctgtaagtacctggcagtggcatctaccctgaaggagaagaggaaggagaaagccaagatccactatcggaagaagaaacagctcatgaggctatggaaaccgggtgaaaagaacgtggagaagaaaactgacaaatacacagaagctctcaagacccatggactcctgatctgagcccagtaaagactgtttattcctcaaaaaaaaaaaaaaaaaaaaaaaaaaaaagcgtgggcctcattcagatgtccttcaccccatctgttcctgatgcctgtaggtcacagcaatagaagcaaagcctttcaaactaatattcaagaaaatcatcaaagtgtacctatcaccagcaagtcatatattggcttaatattcatactggggtatagatgactgatagcttagtgactttctagagcgcaaggctttttggaaggagtgaagagtgagcactgtgggatgggtatgaggtgaggaacatgctgggcagtggggtgaaggtattaaagttggagcaagacctccaaggctcaccagtcccttgatgaggctgcagcttggctagacagagagctgtggttctcagcacaacaaagctcggccatgtagctgccttctgtggggctaatgctttcttacttgcactccagtttccagtaaaagggcagggttgggtttttttaaattgcaaatttccctccatgtccttggaagactcagttataataaaccaacagatcaccttgatatggtttggatgtgtgtcccctccaaatctcatgttgaaatgtgattcccaatgttgaaggtgggccctattaagaggtgatgagatcatgggggtggatccctcatgaatggtttagcaccatcgccttggtgataagtgagttatcactcagttcatgtgagatctggttgtttaaaagtctgggacctaccctccacccccttgctcccacgctcaccatgtgacatgcctgttcctgctttggcttcagccatgattgtaatcttcttgaggcttttaccagatgccgagcaggtgttggtgccatgcttcctgtacagcctgcagaactgtaagccaatgaaacctctgtttttttgttgctgttgtttgttttttcagacggagttttgctcttgttgcccaggctggagtgcgatggcgtgatctctgttcaatgcaacctctgcctcccgggttcaagcgattctcctgcctcagcctcctgagtagctgggattacaggcatgtgccaccacacctggctaattttgtatttttagtagagatggggtttctccatgttggtcaggctggtcttgaactcccaacctcaggtgatccacctgcctcagcctcccaaagtgctgcgattacaggcgtgagccaccacgcctggctgaaacctctgtttttataaattatcaagtctcagttattcctttatagtcatgcaaaaaaactgactaacacacacctgctgctgctgctttaagatcctgtgcagtgagtctgggtttctaacctcaggagagtggctagcaaaggagatcgctagtctccttccagttttgtcctgttgaatggcgtagaagattgattgtatgggtatcagagagaggagtcactaacaaagatgaaaatatagaactcatttgataggtggaagagtagggtggtttcaggtataggttttggagacagagcaatctgaatttgattgtggctccgccatgattgtgagcaagctacttaacctctctcactttcagtttctttaactgcaaaatggaaatggaaacagtgaggattaaatgggatcacacgtggcacaccttgcacaggcttgcataaagcaagtgcgcagtacagttaactgtgattgttgctcctgtgctcacaacacttccattaactggtgcttggaacatcttattttccctttgcataattaatcctctactttggttgacgccagaaatgcagttttgctatacggtgacattgcacatactccaagtgtgtaagccccagacacctttcagtgacactgctgtagggcttagtgacttgccaccaggcagctcacataattgtcttgctgaggtcatagagcccttccctatacttcagctggacacactgaaattcttcaagtcttaggaacaacattgctgcttctcaacattagatttactttctcaaaatccataatgtcagctgggcacagtggcacacagctgtagctccagctacttgggaggctgacgtgggaggattgcttgagtccaggagtttaaggcagcgtaggcaacacagcaagaccctgtctccaaaaataaatccataacatctatagtgtggaaaacataacacccttggagctgtagggagaaaggtgctctcctgtgaatggggaggatggtactgactagctgcagaatttgggcttgagttgctttgtggttttgtctctctttttaagtaaggatgagagactttcactgtttcatttgtccaccttcatatcattacttcttatgacctgcaggaaggatatctggggtggtggaataaactcagggagaagttattggctggggcatggaggtggctaactggtcacacaattgagtttgcatgttgctgagcgccttgcagtttataaaacacctacagagctcatttcatcctcaaagccaccctatgagaaagccagggaaattgtagtatttttattatcactttacaaatgaggaaactgaggcttagaattaagtagcttgcccagtatctcatagctaagcaatggtggatggtatgaccaagtcctcatttccattctcccagtgagttgtttctaagtgagctttatatgcccaagatgatctattaggatggggaaacatattaaaacttctaattctagttatttttagcttgcccttttaacttttaaattttgtttcatagtatcactaatgtattagactagtatgcgcatgtaatttataattaaatacacatactcttgggttccagctccaaaaatttttactgataagggtgcatgattaaaatagcttgaaagccacagctctaagctagtaagagtcttagtaatactggagattaatacatcctctggccctttatctttttttttttttatattattagttacttttggtcaggaactttgattggtctgtattcttcagattaaaccacaaccttgtgaagtggtaatcctgattttctagagtagcagaaggtgttttctatctcctacaaagtcgaaggctgacatgaatcatcttttgttgtaaaaggctattccggtgctttgcaaacttgatggctcccagctcatacagcagaggcaaccccatttccagtatcatttgtgatcacttacaaacagcaagggttcaagtaagcatatgggttcacaggtgtctgcacattggttcttgaatcgtaacaggcccaagcttctctttacaggtttatgttgctagacttgctactctgtggcattcaagagcatggtacttccaataaacactatattggaagttttaagaaggaaggaattattgtctgatttgttcacttctccatccccagcagtgccttgaacccacttggttccactatctgttgattggctgaatgaatggtggattaatggttactcctcaattttatcttttctcttgaccaagacacccctaaaatgatggtaaagaagtgaaaaagagtgcaaagacaatggaaatgggagatatcagcaaacaagcacatgtttttggaagacaggtgaggagtgattgctgactgggcagagtggaggaaacagtgatctatgtgtctacagaaaggtgtttggatgcaaagtgagtatatccgcctgggatataacccttgggaggcctgggagctgaaggcactgtgtacttcagatggcaggggtaatgtgaggggagactgcttgagagtctgaaggtttgtttactggagaaatgggttagaagaggatccagaccaggggacaggaggcatggtgaagggatggggtgatgggcaggctaaacagagtggatggactgagggtggccactctcatggcgtgatgcccttgggcctctgcctccatctgctcttagagcaccctccaggcaggaaaggggataattcatctctgaaaaaacagagaggaattcttctaagaaaatgcctccatatgctggcaactgaaaattctccaaagaaatgatgagttcgcaatgtaatccccctttacaatgggccaccagtaaaaagctccactaaaacaccctgaacctccaagccgcttgtagtgcctcactcttaaatatgaatggccaagaatcaccagacatttaaagacagcacccacctgaaagagactgagacacaataaccaggaatagaggaatatagaagctccacaatgagtagaagagaacttcaaaaacacttattaatgtcctcagagagagaaaccaaaaccaggatgcaacggtaagaaaaaaagcagaaaacaatcaagagctcttggaaattaaaaatatgataggtgacataaaaattttactagaaggcttacaagagccttcaaaaaagaaaacaaaagcaaacagaaagtagaaactgatagagttttagaatccataaggtccaatatctgacaaaaggaattctagaaagagagaaccaagtgaatggggaggaagaaattaaacaaaacaaaacaaaccaccaccagtaaaagaacgttttccagaattgaagaatatgcatttccaaattaaaagggcccaccagtggagtgcccaacccaaagaaagaaaaaaagacctccatgggtgtgaacctggtaggcagggcttgcagtgagctgagagctgagatcacgccactacactccagcctgggcgacagagtgagattccgtctcaaaaaaaaaaaaacaaaaaaataaaaaaaacaaaaaaacctccatggcatattattaagtaatttcagatcaacagtgttacagagaagatcctaaaagctttcagagaacgaaagtggtctcacacaagactggcatctcatattaagagtgacactagagccagaggacaatacgaaaatgtctttaaaatcccgagagaaaattacttccaactttgaatgttctgtagccaccaaattactaatcaagtctgaggacagatccaagacatttccatattttgaagactcgaaaaatttacctttcatgtaggatgcccctggaagattagtcctagcaaaagagggagtaaattgagcaggacgaagacaggcttccagtcagtggacttcccaagacaatgaagagggaagctgttgtcacagaccagcagcacagtaggctgaggggctaatgggctccagaaaatacaggggaattgatgggtttattcagtatgtctgaccagctgggccaaaaatagtgacaggatatacccaatctagtggccaaaattaaggataaacatataggtaagaatgcaagtaaaaaccatgaggcaataattttaggacaagcaaaaacctacatacgagaggaagtggaattgccaatattgcctaatattggtagacaaagacagactcaataagcatgtttttaagacacaaggaaataaatactccttggctctgtaagtgaacagtatagatgcctctcactatccaaacacttagccttcatcttttagaagggaacagatttggatacttttctggaatctgttcctcatcatttgaaattccactactcacatctgaaacccagaaaccaaataaatttggatgtacagtgtctctcattttctgagcttgttatctgacttagaaactggatagattcagatacttgatatttacaagcttgatgtaaccacataccttcactgagaatggagaagccatagggaagggatggaggaaggaaagggggtggagatgtgtgacagccaaaccctccggtatgtgatggaaggttccgagatcctaaatacctaaaaccaataaatgaagaagtactcatatatataccctttatagagatatggagtaaatactagaagaaacagctaaaagagtgaaaagtggttgcctctagggagacaggactagcagtgggtagagacagggcaagggactgctattgaattaagtttttagtacaacttggcttttaaactgtacatatattactttgggggaaaaaagcacataaaaagtttaataagaacactagcctggagaactgggttctggctcaatgtctgtcaccagccaactgtgtttggttgagcaagacactttgatctcaggtctcagttgcttcatctataaaacaaggagttggagtccttcccaactgtccaattctatgactgcatggttctaatgtgcaaatttgggttctctgccaatgttggtggtatcatccaaacttgaattactggactgtaatattatttagcactgtgctaagaaaatagcattttattacatagacatatacctaaaaaatggagacatttggaaaaatgtgcaataagggagtcttgtgatttgccagacacagaggaatgtaaattgtgactattttgcagaagaatgcaatatggaagaaaacacaggatcgtcaaagaagataaaacaacatggccaccaagaaaaaaacaaagcaataataatcaaatagacaaggagggttagacccagaccaggtctaaatgagaaggaggctggacagtggagaaataggaccttcccatggtttttatacaggtgaacagagaagtctgaatggtagatgattttggcaaaagcttgagactggggatgaaaaatgatgagaaagatagtagctgtaatattttacaagagacttacaaatattttacctttgggatatagaaggaagagctgatacggtttgccatcgaggacaaaggtatgaaaaagacacaagacagcagggaccacctgaactacaggtgtccaggaagcacaacatctcagagtaaggccaccttggattccactccaacctgtgtttaatgtatgcagaacggaaggcgaggttgaaaaggaaaggatggggactctgtctttgctggcataagcaagctctgggtcaagaatacagaagaaaatctgacagtcaaagtggcatccatatttgctgaaactgacttctcttgttggatttggagcctctttccaaaacaaacagcaaacttcctttagatccaggcagtaaaattcatttttatatcattcattaaacatttaaaccattcacttaaaaagagaacaaacatttttactgtggtaaaataaaccactcattctcatggacacagtactcttttatgtctttaggagaataatagcaaatgtttattgagtattcacagttcagagaccattctaagagctttatgcaaaatatagttgacccttgaacaccatgggtttgaattgcgtgggttcacttatataccaaagtttttcaaccaaatgaggttgaaaatacagtatttgtgagacatgaaactcgcctgcacagaaggctgacttttcatatattcgggttccgcaaggccgactgagggatgtgagtaagcatggatttggtatacccaggggtcctggaagcaattctccgtgtacactaaggatgactgtatcttgtttaattttttcaacaaccctatgaagtagctactatagatccacaatcccttatccaaagctcttgggcttagtggttttcccaaattgaatttatcaggttttagtaaggtcatatggtgtacattatataacaccccagcagtcgggctgcatcctataatcagaaacactaatatttctgcagtgaaacataggaataatcacactaatttggataaagtgcataataaatagtcatatgtcagttcagggcagactttgatgccaaatgagtgtgcctcaaatttaggggaaaaaaaacaactttgttttcagagtgcttgaaatgcactcttcagaaatacagatcagaatttttatccctatttgatagatgagaaaaccaaggcacaaaaaaaaattacataacttgccccaagggtcagggattgacccaggcagtgtggccccaaacctaggttcttaactgcccttgccatattgcttccttgtatgtggctcacagtttaggattggggtttagagggcataaattacatttttaccgcacaagtagttaaggaacatggtattcagaaccaagcagagtcctgctgatatggaagacagccaggtgacatcaatgcttcccatccctgaaggacagggagaatgacctggaggaagcccaaggcgtggagttgtccatagaagatcttgaaccagaaaggctccaggcacacacagcatcttggaaaggggctgtgcttgcttttaatcccatgggatgaggaaaatacaacaaagtcccagataaaccaggtaaatatggtcagggagacaggtgaatatgaatgtaagaactgaggaggcaacaaagagaaataatgactactctttatcaaacacatactctatgccaactactgtactaagcactttgtaagcaatatcatgttttttccatgcaaaaagtttctgagggagaaaccattattattctcattttatagaagaagaggctgaagctaaatgcacacagtccacagtttgttggaggcagagcttaaggggaagaaagaactggtgggagaaaaagtacagggtttggaagctagaaaattcactgagggagatgagagctgtgagcactgacaatttctaaagaagcaatacatggactccaccggcaagggtattcatggcttatgcaatgagagctattttctatgaagatacttctcaaattatgtcttcatgggataatgcctttgacagggtaaatgaaaagcaagtttaaatactagataagcagtcttatttgctttttcactagggaagataagcaaatatgtagctcccaatctccaacttggagaaggcaatcaatacatttgacaggctgcctgctcagtcctcaaatagtgaagtgaaaaaacagccatttctgggccaggcgctgtggctcacgcctgtaatcccagcactttgggaggctgaggcgggtggatcacttgaggtcaggagttcgagaccagcctggccaatatggtgaaacgccatctctactaaaaatacaaacaaaacaaaacaaaacaaaaaaattagctgggcgtggcggcgtacacctgtagtcccagctacgcgggaggctgaggcaggagaatcacttgaacctgggaagtggaggttgcaatgagccgagatcaggccattgcactcattgcactccagcctgggtaacagagtgagactttgtcttaaaaaacaaacaaacaacaacaacaacaaaaaaccagccatttcccactcagagagaaagctcctatgggccagcatggaggaaggaggggaaatactggggcaattttatggtgatttacttaacgtaattaacagctacaaaacacccacaaatatacactcattgagaagatccacactactgccagggtccccatcttcaacgtaaccaaaatcatagatttcagcatgcattatcaaaatgcatttactaaagtaaggctacttccaaagacagaggagaaaatataaaacttccttttcaaactggccaaagacagagtattgtttacattccaagcaaaatcacaagcacttaacaactggatgttactacgaccttacagggaccttctctggaaagaagaggttgaaaagaaaacagtagttgttgcaaactgtgcaaatcaggttttctaaaacattccctgcaggaaagctgttgtggggctcaaagcttaccctttgggggcaagccttctaagtaggcagtaataagaagcctccttgtcactggggacacacgaagtggctcactcaaagctaatagtggtagatgttaccccatcccccgacagccccattttaaagatgaggacaagaaggccctgggaggctcagttatttatcctactaggtcacgacaagtataggaggtagatccagaaatgacctgggggtctgtccctataactggagcctctatggcagagctggaagaggggctggagtctttatttcacttcatcccactcttcaacttgagcaggggttccatgtttatctgttttactgactcggctttgccttaagattttctttggaaaatgattctatccttcaaacaacaacatcaacaacaaagacaacggttttgaaaaccactgccccatacctgtgactagaagagttgtttaattccccctcccacccagccctgccccatggcgggtgtggggtatggccattgatgactgtggaagaggataagatgtcactgtgtaggaaatgttatacatacctaacgtgtgatttggcagtggaagataacatctgagtcatcaagcagccccacatcaaaacagtaaatcaaaagcaaatgatgtgggaaaacaaattcctgtattcttacagagcctgtgttgggaggattcccatcccagggctcttaacccataaatcaacaaatctctctcttctctaagaggcagctagaaccaacattcctgcttccacttctgtgccaggaaagggagattaggacagtgcctgctatgccatgtcaggtccagtggccttccatgggacctgcacttcctgggactgcacttcctgggaccccagctgcaaagagtgtttcacttctgcagagcagtaagcatttgaaaaggcagggttcacagagctgtcctattgagactttagagacatcttcaagtccagtgcttctcaatctacgtccacaggagcctgggataccttggaagtatctcagttcattctgggggcatctgccccttcttcaaccacaacagttcctctttttgcgttttatacagagggctctgtgtaaagtttggataaagaatgaggtgctccagtccacctttaccgtagatggggtgactggggcctagagagcaaaagtaagttgtgcagtgtacacacttgttggtgaccaagctccaccctgcctgaccaatgcatgccctttatgctaccctggttacatgaagaattctacttcaaaatagctgtataaatgcaaatgccatgtagtctcttcactgtagcgagaaaggctgaaagcacattaggctcattcaggaggtctcctaaattgctctgggaaaaccctgggagatttaaaatgcctagaaagcaatttgttgtaacagcgcttccaaatttccaatttccaactctgtgggctgagctgggcaacaggtggacaaaatcattacataaggaacatctgctgacacccactataaaaaggtcgtggccgaggaactatgaaaagtgctctgggatgctttttgttaaatatggcaggttgataaactatgtctatctctactctctcctgaagccccacaaaaaatgacagtaaatttaattttaaaaagcgtaaactaccagaacaatgtgatagtcctacaatataggagatgagagtagacccaagatgccagtaaaattctggatgctgctgcagagcagttggataaatggtaaatgacttagctgaacacagttagtgggtggggtgaagtggggggcattgacatgggctgattttagcccccaaagcccagaaaggctacccttgagaacagggatgtggggtgggctaggcatgggaagcttggtgggaactctgtataaccttctaccctggtatcctttgcttcttctctgcaaaagactgaagaaatcagagttgtttaagaaaggacatgtaataatagtatggcaggtcattcagctgtgagtaatactcacatgatcataataatataagcccctaatgctgatttagtgagaaatggccatgtgactatattggaaggctgcatggaaaaggggtgtgcagtggggagggcctattgaagaaataagccctcacttttcatggtggcaagttagtagataatataaagcttttaagaatcttgagatggcaggaaaacccagttacttgacattatagaagtaaacagaaaagaacagtgaaaaattttttcaaagtatttgcatttggggagtagaaattgagaatagggaggggattgctaattttctgcaattcggaaactcaagagctctgaaaccaagttttacctaatttggtgactaaactgccttcataacaacacctgacctgaactaatgtgaggctatttctagtctttattaatctgtttaagtgtgaagattacgatttgctacagaaataccttatgtgtttgatgacaggtgacgccccagacctcagtgagtgtaaatcgattacttttccaaagtctgaataattctgaattcgaaaacacacctgcccccaagggcattgcagatgcccctgcaccttctgtgcaccaacaacttggagtagttctggcctcttcccttcctccagtgctcacccagccactgcctgcctgacttctccacggaaagctttgaaaggtgaagtttccactttgcattcaacatgtccagaacggaactactgatttctctcctccccagagcctgcttcttacacaagtctgcccatcgtagttataccaccatcattcacccagttgcttagacaaagaatctaagaatcttccttgacgcctctcttgcccacatcccacctttaatccttcaggaagtagagccagctctaccttcacagctgctaaccacatccattactatcccagcacaagcctccctttctgacttccgtgcttctacctttaccccagaagagcagattctccacagagcagagcttttaaaaacagaaatcagaccatgtctctcctgattaaaaccctctaatggcttctcaccacaccaggataaagtccttactcctcacatcacctgcaaagccctgtatggcttggcttctgcctccccctctgacctcccaccctatcatgttccccttcctgcctcagggtccttggatctgctggtccccaggtcccctagactctcctgaccctcactggctgtttcctcagatcattcagtctcccttgaccacccacagcccctcactcactatctccctgctgcattatcttttgttcactcatcttgcccctactagatcgtaggtgccgtaaaggcagggaattctgcagtcctgttaacccctggagcccctgtatttagggcagagcctggcacacgctacatgataaatgaatacccattaaataaaagagcaaatagatgtactcacaccatttagaacgtaaagaatacagcgaagaaaataaaatcagccttggaatccattgcacagatatagacatatacaaataaatatgtgtgcttagtagtaaaaataattggtaatgttctatatcttaatagggattttggtttcatgagagtatccatttgtcaaaactcagagaaagtatagttaacatttgtacatttcactgtatgtagttttttcctcaaaacaaaaaaccaaatagttaacactagttaatgatatgcatgctggagtatcaaggggaaagcatgctgatgcctgaaatttactttaaaatgcatttaaaaatcagatgcattattggatgaagaagagggggtatagatgataaaacaaatataataaaatggtaatgatacagccagtggtagttataaggaagatttcactgcaaaattctttcaactatgctatgtgttgaatatttttataataaaatgttgggaaaaattaattcggatattgattacagtcagtattcaacatggtttactgaatattttatggtattttcccatgtcatcattgtctttgttttgtttattatttatttatttttgagacaaagtctcactctattgcccaggctggagtgcagtggtatgatctcagctcaccgcaaactctgcctcctaggttcaagcaattctcctgcctcagcctcccaagtagctgggatcacaggcatgtgccaccacgcctggctaattttgtatttttagtagagacagagtttcaccatgttgcccaggctggtcttgaactcctgacctcaggtgatccacctgccttggcctcccaaagtgctgggattacatacgtgagccaccacgcctggcctcatcattgactttgaaagcttggcttcacccagctgtatagtatgccactgaatggatatatcacaaattacttaaccagtctcctatctttggaactatgggccaccttcaattttacacttttatcaacaacagagtaatgaaaatccttgtatataaatctgtgtgcctaatgtttgcctactcagtttatgtgcccagaaatgcaatactaaggtcaaacgtcataacattttaggatcctgatacgcacacctaccttgctgaagggtgctattctgatgggtatattcttattttctgatgagtctgtaagtttcttgagagagagcaactgctttgctctgcctccctcactgggctgagcgtactgccacacacactgtaggcttgcagaaaaacaacttcaataacgttcagagaacatgactagaacgaatcctgccacactgctgagaacggggagaggtactcttctttacaggaaatttgaggctgcctttttgtgatggagtggaggggagagggctgcagacgaaacgcaatctagcagccaaaaccagggtctttcagatgcctactgggaatccagggccagtttttcccagggctaaaagtggtctctgggactcactgaatgggttttggttgaaccaaaacaatggaatcctcttgacccttaaacagaatgaggtcaagctgcatgaatgctgggggagaggcagggtgcaggaggggcttcactttctgtgctccatgcccctgtggaagctgttttttttttttaataatttataagtgtgtggtttttttttttttttttttttttgagaaagggtctcactctgtcacctgggctaaagtgcagtggtgcaatcatggctcactgtaacctctgcatcccgggctcaggtgatcctcccacctcagcctcctgagaagctgggactacaggcgcatgccaccatgataggctcatttttgtattttttgtagagatggattctagccatgttgcccaggctggtcttgaactcctgggctcaagggacctgcccacctcagcctcccaaagtgttgggattacaggcgtgagccagtgtccagccttaattgtataattaaaaaaaaaaaaagtttccggaggtaaggggcccaagttggtgggttgactctttcagaccacgcacttgaaatcagcatgtgagtctttcagcctgaactccagtagaccagcatttccatttcagagctcagcggagacggactcctcacttcacacactggtcttagtccaaaagttcatttgtaagttgtggtttggagcttggaacatatttccctatacaatggagacagtttctcttctggccaacaagagcttttctgacccttcataaaaccaaaataaatcccattttcttaaaggatagaaaaaccctattaacagaaatactgaagggactttcacaacactggtgacagaggcagaaatttttctaaaaaagaaactttcttgggaagtttggctagtggcacccttctctctctctctctttttttcaagaggaagaataccaagggaaaaaaaccctcagaactttctgaggaaaccagctaagggataaaatgtgagagggtaaagaagtcttcagaaactgtgagaacaagcttgctctgaggtgaaatgtccaatttatccagggaagaagcagctggcacgcgctgcatccccagagtaaattaaaagtagaacggtgacagccaagagaggcagtgccccaaaccaggagggctgggggagaaggggcatgggatggcactgggctatgggggaccagagatgaaacccacaggaaccccaaactcttgcagtgaagggaatatgcctactgcacagaacatggaggtttctatcatgttcaagagaaaatatttagccgaaagtactcttatacctggacccttgagaatttaagcctctgaatcacacaagagcttcagggtcacccaaacaaccaaaatgacccaaagatcagaaaaacaaccgaacaaatgagacgaatgtgttaaaaagcccaggagagagtgattagggagaaaatgggatgccagcatttaaatggtagggcaacaaactcccagctgagggtgatgtttccagagaagcggggaaggaaaagtaaattatcagggacagatggcaaacaatatcaggtggcataagcatccccagaagaaagtgttagaactgggagacatcagggcaggtggttccctccacacatctgcctactccatagcacctggccctgaacagagtctcaaaggacatctcaggatttgaaatcatcttgaaagcagtctgttaggctgttcttgcactgctataaagaaatacccgaggctgggtaatttataagaaaataggtttaggctgggtgtggtggttcacgcttgtaatcccagcacttttgggaggctgagacagatcacctgaggtcaggagtttgagaccagcctggccaaaatggcaaaaccccatctctactaaaaatacaaaaattagccgggtgtggtggtgtgtgcctgtaatcccagctactcgggaggctgaggcaggagaatcgcttgaacccaggaggtggaggcatggtactgacattgctcggcttctggggaggcctcagggagcttttactcatggtggaagacgaagcgcgagagagtgagtgggtggggggaggtgccacacacttttcaaagatcagatcttgtgtgaactcagagcgtgagttcacttatcaccaaagggatggctcaagccattcatgaggggtccacccccatgacacaaatacctcccaccaggccccacctccaacactgaggattaccttttaacatgagatctgggtggggacaaatatccaaactatatcatagtcatccactggccttctgattccttcctacttctttgaatctacaatgccctaagatgcaccattattttatctactagtaagaaacaagaaaccaaactacccaatgataacacaacatgaaatttaagatggatccctgctttggagaagttaaaatgtgaaaaaaaaaaaaaagtgggcatcttagaatcagtgaaatatgaagggttggaaggatatactactatctggctgttttcagaaggggtgcatgggaccatgacactgcctcccatccacagcaccagtgaaagggtgccagtgaaaagattcacttggcatagatgtatcatccccagaatccacatatgatgggggaaggaagagctgagaaggaggtgaacgcatgaacagggagcagcaaaagacagcagggacggaaggactccctggggatctgctttactgtctctgtggagggtggactcagccatggaacacgtccctggccacccttctccactcacatggcgagcccgatgccaacagcggaggcctccgtgagacaagtggcactctggacctctggggacgtttgccaaatgcctgcctccctcgtgaatgaacactacacatgtgcgctcgctctcgatggcgcaggtcctaaaagcaggagtcgggctgcacaggaaatgttttgcaaagaatgaaccaagtcttctccctcggaaaatagcttccctccagcctccttcaagggagttggaaaggaatgcttcccatttgcaaatcaataacttacattggctgtgtagacaataaagcgcaatatgtgatcctagagacccataatggctcagtgttctaacataatcctgccctccaagaagcagacaagaaaacgacacaggcctcccagctgtgtctgcccagtgccacaccaaaggctggtggtctgcctgtcgttctttctttttttggtggaaaatcagaaggcttcggctgagcatgctgccaggagccgaagacactcgacattttaccatttcctacttttcacagctatttgcataagcgttgttaggaaaatacctataccaggagggagatggtttaatggaaaaagcatttcaatcattcactttcagccagaatttcacacactcggaggcacttgacattatccttggaaaccaggagagaaacagctgctgcataggccacacccctagggatttcagccttttgatataagaggagtggcctgtgcagaaatcggttagattctgtgaaattccagccaggagcaggggctgagagactgggtaataaactgatctctgtcccacctggatcagcccagtatccaacccacagggacaataaaaaaaggcctgtggctggcaaacatcatcttccctgattgttccactcctttctaattactctgcgcgtctggcacccaaacaagggcccagagcaacgtggaaatgacccgaactcctggatcaccgggcaccctgccagccaggtctctaggagtctaggaatgttccattatcaatccacttgcctcatctgaagagttggctggagcacacctctacttccttttcactcacgagaaagactctaggaacctcagtcactcccaacagaaaagcaaaggaatccattccttcacgaagcatcatctctgcttaaaccaggcattcctcaggttaggcagaaatctctgaagaactcgggactgcccactcaactttaggaaagccagcccctgcgggaagccacccatgcaaggcaaccaatcaaactagccagcagcatctgacacattcagctgtgggtgttctagatacaaatacagaggtttttccttttacaaaggccaaatagcatgctgttatgggcaatggctcagctgagagacgtttttaggaagctgttgctgctgcatgaaaaaaaaaaaagcttgtggattttgtgcacttaaaatgaaaatcaaaacttgaacatggaagatggttgcctgatggtttggcatctcaccctggcctaaacactccaaatccaaccctgggctttccatgtctcagcccgatgcactctttactgccttcactcccagtttgctgggcacatgggtgtaaatgctggcagcttccccgtttggactgggttcaagatggtacctgattagcacatatgagcctgtttggccattcagcctacactgaatggtccatctggggtgtctgaatggcagctgttacagttagagcacaaggtgagatgagatgagtcttctcccttttctccctgcatctctgctcatgatacccagaggagaggaagaacttaaacaccccacaagggatgacagccttaggtccagcctcatatgcagggcagagaggactgatgagtatctactttgttgcactcagagagcccatgaacacccatgggaaaatacacctactgagcacctactatgtgccaggcatgggaaagaggaatataaatgagacatacggtctgtgttaaaggcacccagagtccaccagaaaggaggacaggtgaaataagaaataatacaatattattatatgctgtaacagaaacacctgaaatgtgctatgtaaacagatgaggacttggctaattctgcatgggtctgaggtttagggtggtgtcagggaaacctcatttgaactgggccttcatggatgagtaggaagttgccaggtggaccaaggcagcagtcaggatcagaggagtcagaggagagggtgagtggtctgtggagagcacagggactctgccggcaggcagtggctgggcctgggagggcccacaagggccacagtgaggggctgtatgccaacttcacccagcagaccccagggagccactggcatgagtgtaggagcagagtgacaatccgatctgagttctggaaaagtcatgctggagacagtaaagctggattggagagtcactaaccaggcactaaccaggagaaagcccagtcaagaggttactatgaaggtcctagagaacgggggcttggatagcctgctgctgtggcgaagaggaggggccagagcagaagtgcttcagggtggagtccacagggctgcaggtagcaggaaatgatgcctgcctggggccaaaaagcctggcgccttgaatgtgtctgagtccaggctgccaacacaccagctcttctgccacattttctgaaccttcctgattctcagattcaccagtgccagaatctgagcaacaccccggctcccagctctgttgtatcttctccagatcacacatactgccccccagagcttacaacccagctgtcaaatgctgggccagagagcctccctgtccaacccctgcatctccaacggctccagggccagaagccccaagaaagaaatggggtatacttcccacttgattctgtctacagaccgccttctaaatacaaaaaagaagtaacttaccggcggtgagcacactcttccaggtttacctgccccagctggtgtcaggaattccagtattcatctggtttacctttgcccccaagttctggccccatggagtgatggcaatctcagggtcctctcagaacccttatagggacattttcctgtgtccagagaaatctggacataagacaatcctaatgtccttggtgaactccaggaggaatgcattttgggtaaggccaggacagatcacttgggcagatgagctccaggtgttttttctataaatctcattgctaatatctgagacaggagcaacactgagctttgtgcgtgctgcacagtgtttttgtttataagacagtttcccggtgtctaatggcattggatcccacaacaccatgggaggtcggggggtcaggcactcctagaaggccacatggagcagagcatgagaccgcaggttctgcagttgaaatgcctgtcctggagcactgctcagcctctcactggctgcctcaccttggacaagtactctgtttccttgtgcctcattttctccagctgaaaagtggaactaatacagcagtccttgcttatccacggtttcactttccagttttagttacatgcagccaatcatggtccaaaaatattaagtggaaaatcccagaagtaaacaattcataggttttaaattgtgcactgttaagagcagcttgatgaaatctcatgctgtccactccatcccacctgggatatgaatcatccctttgcccagcagatccatattgtctattccacctgcctatcagtcacttagtagcgtctcagtcatctgatggaaggctgtggcatctcggtgcttgcattcaagtaatccttactttcctgaacaatggccccaaagcgcaagaatagtgatgctggcatattgttataattgttccattttgttactagttattattgttaatctcttactgtgcctcatttaaaaattaaactatcacagtatgtacgtatgcataggcaaaaatggtagacacagggtttagtactatctgtggattcagacatccactgggggtcttggaactgtatcccttgtagataagggggactactggactaatgcctagcacatagtgggtactttataagcattcttagagaaagatctgcaatttagaatgacttaaacagggtgctccaggctgaggaacttgcctgaagttgcccggctggaatgtgagatggggaactagaattctttggctcccagaccgtactcttcatgccacgtcaagccactctgggaagcacctattctctggccagtccctcttcctgcctgggaaagggcctttacatggcaaacaatgtatattgtcatcttacagcaataaccattaaagtagaagggttttttttttttgaaaatttttattgaggtaaaattcatataacacaaaattaattattttaaacattgcaaagtgtacaattcaatgtgtaatcctcaatggtgtgtagctactaccactatctaatatgagaatatttttaccaccccaaagagaaaccccgtacttcccaattcccctttttgctcagcctctggcaaccactaatctatttcctctctacggattgccctattctgaatgtttcatatgcatggaatcatccaatatatggtcctttgcttctttctttcacttaacataatgttttcaaggttcatccatgttatagcaggtattgatatttcacgcctttttttggctgaataattctcattgtaggatatactacattctatttatccatttatcatttgatgcacatttgggtatttctacctttgggctattgtgaatagtgctgctctgaatactggtgtacaagtttttgtgtgaccttaggtatataactagaagtggaattgctggatcataccataactgtatgcctaaccttttgaggaactgccgaactgctttccacagtggctgtgccattttacattcccaacagcaatgtgtaagggtttcaatttctccacaatcctcgccaacacttgtaattttcctttctattttaaaatatatatagtattatagccatcctactggatggagagtggtgtctcttggggttttgatttgcatttccctaatgactaatgatgttgagcatcttttcatgtacagtacatctttaggttcttgatattatggaagttgaaataaaagatacgaaatcttcagctttttttcttaaaatgaaggcgtgagcttggtgcaggcagagcaagctgatccacctagagactgcagcagggaaaccgaatacccaacagacagggtcctttggtcatttcctatgttcagcaagcaaatggtggccccaaggttagggtgggatttgggaaggctgcaccagctcacaaaagcttccacatctagctggggcccaccctggttctgtttctctggttattaggtcctatctgtctttagaatggcagtccaactttgtccacaggcttgaaggtgggattagcaagatggtctgagatgctcagcttgcagaccaattgcgggcctcagaaaagccggggcattaaggataaatgccacatgacagatccatctaggaagctaagtgagcggatggccccaaatgccagccaatggcaggtctgggcactcacagaagcaaaaccctcctgtggtacaggggcagcaaagtggctgaaggctgactgatgtgtgagccctgtgagcctttgactcactctgccaagggcagaggcagagtacagctaggcaagcaccttttggaaaacgggccactggccaccactgtgaggggtggttaccctaggcatgggtgttccaggacccaggttccctcttcttttcaatgctgccttctggccatttcatttctcagggccttctcaagagacaggagataagaaaacaccattgcatgtttccacaattcttgtagaaagctatggcccagggatggctggagccaatggattcctgctccattactgtgtaaaaagctaccccaaaactctggtttaaaaccacaatttgttattatctctcacagttcaatggattgactaaactcaactgggcagttttcccttacaatcagatgtcaactgaagctacagcagtatctgtagatctactgagctggatgtccaagatggcccattcacatggctggcatctgatgcttggtgtcagcgagggatgttgactggagggcctccaccccaaatggcctgcacttcttatagcttggtagctggatccaagaaggtgcatcctgacagtgagttttcaaagaaactcaggcagaagttgcaagacccttgtgacccaggctctgtgtcacttctgccatattctattggtcaagactgagtcacaaggaacactctccaactctttgaggctagtatcaccttaccagacaaagacatcataagaaaactaaatcccttctgaacatagacataaaaatctccaacaagatactagcaaaccaaattcagcaatatataaaaaggattatgtaccatgaacaagtggaatttatcccagcaatgcaagagtggttcaacatatgaaaatcaatccatgtaatataccatattaacataataaagggcaaaactacactatcatctcaacggacacagaaaatgcatttgacaaatccaatccccttcttaataaaaacactcaaccaacaagaatggaaggaaactttttcaacttgataaagtgtatttatgaaaagcccacagttaatatcatacttaatagtaagagatttaatgctttctccccaagatcaggaataagacaagaatgtccactctcaccatcagtactcaatattatactgaatattctagccagagcaattaggcaagaaaaataaataaaatgcattcagattggaaaggaaaaggtaaaaccatctctatttgcagatgacatgaccttatatacagaaagccctaaggaataaatacacacaaagaaaactatgagagttaacaaacaagtttaacacggttgcggaataaaagaacatacataagaatcagttgtgggctgggcaaggtgacttatgcctttaatcccagcactttgggaggctgaggtgggaggatcacctgaggtcagaagtttgagaccagcctggccaacatggtgaaaccctgtctctaccaaaaatacaaaaattagccgggcatcgtggcgggtgcctgtaatcccagctactcaggaggctgaggcaggaggattgcttgaacctgggaggcggaggttgcagtgagccaagattgcaccagtgcattccagcctgtgtgacagagcaaaactctgtctcaaaaaaaaaaaaaaaaaaaaaaaaaaaatcagttcagttgtatttctacacactagcaatggacaatcagtaaaattaggaagacaatttcatttacaataatatcaaaaataaaatacttaccaataagtttagccaaagagatgtaagacttgtacatggaaactataaatacagttgacagaaattaagatctaagtaaatacaaagccttcccatgttcatgcgttggaagacctaatgttgctaagatggtttgcattctctaaactgatctacagattcaacgtaatctttgtaagtacccagtcttttttttttttttttgaagaaattgacaaagtaatcctaaaattcatatggaaattcaagaagttcctattgtttaaagccaaaacaattttgaaaaagaacaaagttggaagactcatactttccagtttcaaaactttctatgaagccacagtatccaagatagtgtgttactggcattaggatatatagatcaatggaacagaactgagagtctagaaataaactcatatttatggtcaactgatcttcatcaagagttccaagacaattcaatggaacaaagaatagtctctttcaaaaaatgatgctgagacaactggatagccacatgaaaaagaattttggcccctacttcacaccatgtacaaaaacatacctcgaaagacaccatagatctaatgtaggagctaaaactacaaaactcctagaagaaaacataggagcaaatcttgtgacctgaaattagacaatggtttcttagatataacaccaaaagtgtaagcaataaaagaaatatttgataaacaggacatcatcaaaattaaaagcttttgtgcttcaaaggacatcatcaagaaagcaaaaaagacaacccacagaagggaaaaatatttgcaaattatatctgataagaaatatataatttcttatacatatccagaataaataaagaattcttaaaacttaaagagaaataatctaatagctattagggatgctaaggtgggaggatcgcttgagcctaggagattgaagccaccgtcggcaacacagcgagaccctgtctctaaaagaaataaaatttgtaaaaatggccaataggtgccatcaagcacattaaaagatggtcaacatcatgtagtcatcaggaaaatgcaaatcaaaaccacaatgaaataccacttaaaacccactaagatggccatgataaaaaagactgataataacaaatgttggtaaggatatagagaaattagaaccctcatacattgttggtgggaatttaaaatggtgcggctgctttagaaaacagtttcacagttcttcaaaaaattaagcatggagttaccatatgattcagcaatttcactcctaggtatatacccaagagaaaacatatgtccacaaaaacttatacacatgctcacagcagcacaattcaaaatagccagaaggtaaaaataatccaaatgtccatcaactggtaaatgaatagacagaatgtagcatatcctacagtggaatactgttcagctacaaaaaggaatgaggtattgatacctgctaccacatgaatgaaccctgaaacattatgctaagtgaaagaagccacacataaaaggccacatattatataattccatttatacgaaatgttcagaactgggcaatccatagagacagaaagttgattcgtagttgccagggactgaggggaggagggaatggtcagcaactgctaatgggtacaaggtttctttcgggactaacagatatgttctggaatgagatagtggtgttggttgtaccacttgtgaatatattaataccaaaaacaactttaaaggagtgaattttgtggcatatgaattatatcttaatggcaattattaaaacacatacataaagtgtgtcacagggtgagccaagcgtcacagagaagagactacatgggaggcgtgttccctgaaaaggcacctctgaagaccagttaccatgtgcactccaactcacttcttggcttgatgggtgagaacattgggagttggccactagattaaggactggatggatctagttttaacttttgatcctgaaatttgagagagaaatcatatcctggtatcttttgggcttctttatcagtagcaaaacagtcagacaggacctctagcaacaaggagaaagcatgcaggctggaagcctagagaacaggtccagctgagaaataatgtacagcagcaagggcaggtaaaatcagggcagggttgactcttctagagccaaccaacaggtccagatgtggatggtgctaaggaagacctaaactgtaaaactattgtttaccccaagaacaagagctcaggacagtagaaagtacatgggtggtagagatgaacagatccaggttcaaatcctggctctgccacttattagctgtgtgatcttaaaagagcttcttaatttttctctgccccagtttactcggctctttgcagggtgataagactgaaaggctaatatatatgaaaagtgcctggcatataatagttgttcagtaaatggtagtttttattattagtactgtcttgtcagcataactattcatacgaaatggcccctgccagcattcagtaacacctgccatgtggtttgagaattatctggaaatttctattttcctagctactttggtcctataggcaagattggatagaaaatgtttgagcattaagatttcctaaaactcatgtgatccaaatatgacagacatgggtaagttagccttaatctatagagggctcttagaaaacaatgggaaaaaagattaataggccaatggaaaattaagcaaaaaccatgaaaaagcaactcatataagaacatacacaaagctaacgaaatgttcaaccttattagtaatcataagaatgaaaactaaaataagataacatttgaacttattaaatcatcaaatatctgacaatctttggtgagatattggccagagttgggaaaacagccactctcatacactcctgatgggagtattaattggaacaatatttctagagggcaatttagcaatgagtatcaaaagcctcaaaaacagcacactcttagactcagcattccacttctaagaatttatgctttagaaataatcatgaatgtgtgcaaaaatttagctacaaggatattcatttgattgcaatattatttttaataatgagaacctgaaaacaaccaatatatccaatgacagggaattagttaaataaattatgaaatacatttacaatggaatacttaataactaggaaaggtactcaccataatcaacataatacaaaattatcccatttttgtaagttacaggaaacaaacaaaaggtcagcactggttaattccagatgacaggggtataggctagcttttttcttcttttgttgatgtgcatcttctacagtgatcacatatcacttttgcatgaagaaaaagcatcattaaataaatctactcatggaggtccaggccctccatgattgcagctccgtgcacccagcctagagcatgctgctcctcggcccagtgactattcttctagcctccagttccctcagcctgccagcccagagtgtgttctcagggctgggtcactgctttctgctcctctctgggccctctccctgcactgcatggctctagactcaggtctgccactagctatcaccccagtggatcacttggtctcctcacctccattcctccacctgcaagtcccatgacctaaggcttatcctccactcctaaccccacgacacagcagtctgaaaataaaactgctccactgaatttgaccattattgcaccattatcaccaccctattattagtccatcagaggggacaggccatcaccactggcctgagaggagatggacaatctcaacagggcttggaggtgtgatttcacttccctgccaaggaggtggcagaaggctggtcaccacaccagggcgtcactccttgacaacaccacaactgcccagagtccgtccctacgtagtgatatgcaggtggggagggctctggcaagaagttagtgtaaccagatcccttctgacagacctgagatgcgcaggaattcttaagggcaagagggtcaagcctggttttctccctgaatctccacccaaacaccaaaacaccagggctgggcccccgctagaagatgtgctgctcatgggtcatgcaggctgtactgaaagacaacaagtcacaggaagctgcctctcttacagggtggtgccgtcctgtggtttcccaccctcttggaggtgtagccattgtttgcttggtttcatgacacctcttctcctcctgaaagtgctgtatgttgattttccttctaagtgaagtgaacacaaatgattcaccaggggccctgaggtcactggggctccctgaggatgttcaggcccctgaatgacaatgggtgctctgaagtctgggccacttccttccctcctgcttcccatctgaacttagaggcagattaagccccagctgctctcagctctttaaacagagttgccctgatgggctggcaagttcacacatacctgcaccttctgaggctaccacaagagctttctgtgactcttcaaatttcatgctttatcttaaaaattaatgcaaattttccttgatactctatttttgccctactgtattttattaattctaagctgcactcacccccacttccattgtaacatctttaaaatcaggatgtcttagaatccacagtggctgtagtttaattggcagtgctttttctcagtgttacataaaataacaatgtattttctgataaatggcatcttagagttgatgaaatataatgataaaaaaatactttcctgtagaattagagttgaactgacattctgaaagatgtgccaccacgtttgcacactcctggctccctgcctagggccctggtttaaggaccatttccagatgtcatttcctcatgcctgtcatgccccatggcatcgggaatacagccttcaccagcacactgttcccacaggagaggaccatgaggaagctcatcctgaaggacaccccctagtcctctgttccaggggctactcaatggcaaccaaaggaaatgttcactgcgcatttcccatgggccatgcattgagctaaatgctgtgtgttcacttccttcaactttgccaacaaccctatgagctacctgtgatatcccattaagcagatgggaaaaataaggctgtgagaggttataggactttcctctgtgctgaacccagatctctctgacttaagaggcctagcactgatccctgtgcctcctgaagaacgagcacagagcgagcatgggcttctgctgcaagacactgtggtgtctccttctgcacagaaggggtacccatgctccatatggcctgcctgtttggaaagtgatcctcacttgcctgcaagagagtccctctcaggagctcccggtttcccatctccccagactctgcaaatgccctcagtgggggccctggtgtgtaggctgagctggaggacaagatacagacagatctcagagataatgaaagtcaatatcaaaaggggcagaaagccatctctgcccccaggatatgtcacttcagttcttattccttcctgctgccccgcttccttataacttacctcttcacctagacacttccaaactcaacttcccacaacacctccctccccttgctctcaaattctggctcgttttttatgtgtatcccacaatgatttacaaccctgaaactaacccagggaaaccactggatttctcagacctgccctctcctccaggcaataataccagctaccatttttctgaccatctataggatggcagctggtgacttatccctaatcttcctaggtctggtcctgttgtccaaatgagcaagcagaggaacagagaggcaaggtagctagcctaaagtcacacagcaagcaagcagcagggccaagaagttagctaaggtctgactgcaaagctacgcctttccccctgcaccatcgagttcctcgacgatcaactatacgcagagatgggactgaaaggtggcttctccagctagcatacatattaccagtctttctctgtatctctgtcagtctatctcccagtaaaaatccaaacaccaatcatgtcaatagggctagatttgcaagtggctgtccccagccctttaccccaaacagggaggactcttcctcaggagatttgcatgtatcacaaaccctaacaccaaaatgcaacttttaaagcagcaagcttattcctcacgtgtttccatccccctcccatgtggctcacccccttgttatttctgggcacaggtgtgtctcccccacaagctgtaaatttctttaaacattttgttgttgttgttgttgttgaaagggcgaagaagtccacaggaaaggaaaaggaaaaaccacagaaccatccccaggagaaatgtgcacacacaaaacacgccctcacacctctgcaattcttcatgcaacaggagagcttcacagggcacaagtgaagaatcacgattctgtttccctcttgcaccctctattctgtgtctgtacacagtaagtgctgaataattttatgaaggatcaatgccactacttctctctcctcctccttccaccaccatctttggtcagaaagaatgtagctgtttactttatcacactttctatgaggcgcttccctggctctcagatttctaagttctctgtaccatcctccctctgtgaagttccatcaccttcctgttctatgtcgtccataccctgttcccagaggcttgcccctgcctctctctagtcccccatgaattttgccagttctttattgacaggcagccctatactactggcagggaccttacagtcctcccctcatctcacagatggagatcaccaggacttgctctgtaattgcacaaggttgccctgttttctgacagagggagacccaatcccaggaatcttgacccagttagttcagccttcctaaccctccctatacaacctctgcccagcaatctgctgcctcctccctggaaagcaaaagcactagtggccttgtgtgatcctggcctctcagattttcagctctggcaggactcttccagaccatgaagcaaggacctttgtgcaagctagaaaaaggcaccctctctggtcagatgcagcacagggggcgcacagtttggcaagcagagtgccagcttgatctgacccctcggccagcaatcctgcacagggcccttccgcacacacattcctgtcagctctgatggagaggtgcacctcggctggcttatctcggaaggactgaagcatcatcccagtcacatcagttctctccaggtctctgtttgacccgctcacagatagaaacaggtatacatttgacccactcacagatggaaacaggtatacccgcattcacagcagcattattcacaatgcccaaatgattggataaataaaatgtcaaatatacatacgatgagatattatttaacctttgaaaggaaggaaattctggtacatgctacaacatcgattaaccttggaaacattacgctcagtgaaagaaacgagtcgcaaaaggacacacactgcatgaatccccttatatgaggggaatagatgattagaataggtgacttcataggaacagaaagtagaatagagaacgtagaacaggtaccaaggctgaggggaggcaggaatggggaattattgtttaatgggtttagagtttctgtttgggatgatagaaaagttctggaaatgcatagtggcaatggttgcacaacactgtgaatgtccttagtaacgctgaattatacactctaaactggttaaagtattaaaattttaagttacatatatttttaaaagtttaaaaattaaatgtaggctacatgcagtgactcacgcctgtaatcccagcactctgggaggccgaggcgtgtagatcacctgactgaggtcaggagcttgagaccagcctggccaacatggtgaaaccccatctctactaaaaatacaaccattaggctgggcgtggtggcaggtgcctataatcccagctacttcggaggctgaggcaggagaatcacttgaacccgggaggcggaggttgcagtgagcagagatcgcaccattacactccagcctgggtgacagagcaagactcggtctcaaaaaacaaacaaacaaaaaacaacaaacaaacaaaaaaaacaaaaaaagccccacaaaaatgagctgggcgtggtggtgggcgcctgtaatcccagttactcgggaggctgaggcaggagaattccttgaacctgggaggcggaggttgcagcgagcagagattgcaccactgcactccagcctgggcaacagagcgagactctgtctcaaaaaacaaaacaaaacaaaacaaaacaaaaacaaattaaatgtgctctatattgtggctttaacaaaaagggcgggcggtagggaacaacagcacctggctgtacctctctctgaaaagatgaggattcataatacttcccacaagcgcttgatgcaccaggagcagcacctcatttcccggggcccgacacctccacaggggcctaacatctgtggacacgcggcggtctaagcaccgactggctgaaaggtgccacatcgatttaaacatccccttcatcctggccgttccctccacccccagagcccatctctgcaggcaggcagttttccctataaggccgcggcagccaggcccattcttggtaggcgtaaactgccatcctgctataaatcctttcccacaaagcactggagactggtcctctcactgtgccaagaagtctttttctgaccatctgtaatccattcaaaggcaaccggcaggaaatggcggcaaggaaaacccctgcaaaatgcaactggtgggaccacctctcctcccgctagtggccagaaacaggaagtgggcctttcttgggacacacaacatctgtgggagttctggaggctgctgagcgtctgtcaggggctgaacggctcgagacagatgctcacaaaatttggtaagaaaagcatgctgtattgggtttgaaaattagctctgaaaaaaaaaaaaaaaaaagcatttgaaaaaccaaaacaaaccccagacccttatagaggaaaaaaaaaaaaacacaaaacacaaaaaccccatcatatgaaaactaacctcaaaattgctttcttctgatttctatggacaattagaccataatttcaagcagttcaaatccttcttagtgaggctccccctccaatctggtattgtcagctgctgctgcttaatagtgacagcttcatttttggcactaaaagctgaagccctcaaagctttgcagttgtaagctggggccagcttgtaaaggctcacaagagctgattgttaaattctcaggaatgtggtgagccaattattaaattattaaaagttatatgacataagcttacaattgaatataaaactcatcatttccaatttatcttgctacatttcacttattatctatgctttgagtatgggttgggaactttctcttttcttcttcttctttttttttttttttgagatggagtctcaccctgtcaccaggctggagtgcagtggtgtgatcttggctcactgcaacctccacctcccaggttcaggtgattctcctgcctcagcctcccaagtagctggaactacaggtgtgcgccaccacgcccagctaatttttgtatttttagtacagatggggtttcaccctgttggccaggatggtcttgatctcttggcctcgtgatccgtccgcctcggcctcccaaagtgctgggatcacaggcgtgagccactgtgggtagtaaaaattttaggctttgtctcaactactccatgcaggcattgtagtgcaaaagctagcacagacaatacattaaaaaatgagtgtggctatgttccaataaaactttattaaaaacaggcagcccatgggccacacgttgcttaatcctgctctcaaagtcatttaccatctaatgtatctgtatggaggatatcctacgtaacagtgtgctgatgcatatctcttcccaactctgagttctgtgatatcacattgacagcttgaaatgcagtggtaggagagtttacaccatggaaatcatcacatactacaaatcagggcatgatttattatttttttgattatcaaaatttaagaaagtgatggagaaaattttaatgatgtaagttaaattaaaagaatagtcaaccctctgaatctgtgagttccacatctgcagtttcaacttaattgcagatcaaaaatatgtggaagaaaaagaaaagatgcctgagtctatactgaacatgtacagaccttttcctcttgtcattatcccctaaacaattcagaatgacaactatttacacagcatttacattgtattaggtattataagtaatctagagattatttaaagtctatgaaaaaactgtataagttatatgtaaatactacaccatttcatataagggataagaatccaaggatttggggtctcagaaccaatccttcgatatcaagggacagctgtatatcatgtctctagctttattgtgaatactacaaaacaatgaggacatattcttttagtacttgaaaaccattattcagttcagcaagaaagtcacgtcactaacaatcaagtgaagttttaacatttatctttgttctttccctttcaacttactcactgacttaaatgaaaatatcaaccaatacttatgtggggtttacacctgtttgtcaatttaaaccttaggaaggttggggatataagaatttggcagaagtcaaccaaagcatttggtaagaatctatagactatatgaaatctacaaaaaagaatttaggctgggcatagtggctcaggcctgtaatcccagcactttgggaggctgaggcgggtcgatcacctgaggtcaggagttcaagaccagcctggccaacatggtgaaaccctgtttctattaaaaatacaaaaattagcggggcatggtggcaggagcctgtaattccagatactcgggaggctgaggcaggagaatcgctggaacttgggaggtggagactgcagtgagccgagatagtgccattgcactccagcctgggcaacaagagtgagactcagtctcaaaaaaaaaaaaaaaaagaatttaaatattttattctttataaagcatatgctaaacagcttttttaaatcagtaaaatgtataataaacatatatttccatatgcactaacttttttagatagcagattgttaaacatttactagcacaacactgattctaatagaaaagaacttacaaattaattggtcagcagcacccaaaaagtgtgtgtgtatgtgtgtgtgtgtgtgtgtgagacagagagagagagagagaaaataactctccctccagcaccctgaatggagaaagcaaaacaaacactaacactaccaaagaaaacagaaggctgttttctgaaaactctacttcaaaaaaagacggcatggagttaggcactgagtgtgtctacaactggaataaattatgaactgtttctctttggtattaatggagtttcaccataatttctttttctaaaagcaacctcttgaggaactcatagccctcaaagcctttgcttaagctcttccttccctgtacaatgccctgaatgtccaaatcctagctgctgtgttgcctctgcacgaggtgtccattcattcattctttcattcatttttcaaacattaacttgactcctactaactatcctttactgtggcccatgtaaaaccacaaaccaaacagcctctacctttaagtcaaaggtctgagacccaggttaaaggtctggctgaccatagactgagatatcttccttccctgggctctaaggcattctaatcacatttcattttctaagcaacatcagagttcccaggtgctgcaagtgagttcctagagggcagggccactgttccaccttcacattccacacagagcccagcccagggccttccacctcctggacaactggtcactttctacgcagtcagcaatgcaggaagcacagctctggcttctgacttgcagagcatcactcatcatgacttcccatttaacttcagtggttcaccagacccaggctaaatactgtgctccctctgaaaggtgggagaaggattattttaagtataattatcttcttccttccccaggttaaagtagagggtcacttgactgtgtgggataatatttctcaatgtttttaaactcatgctctaccaagattggatcacactttacttcctgaggtttgtactacaaagctcactttctctctaagacttcccactgattgtggttttcacactatacaagcatcttcttgaaattctagtgtacccagtcctaaaccttgttcctccttagcttaagaatcacaggccatcaccttcaccttcaagattaggctacagggggaaaaaaaaaagaatcataggctggtgcagtgttcatgcctgtaatcccagcactttgggaggctgaggcaggaggattgcttaggcccaggagttggagaccagcctgggcaacatagcaagatcctgtctctacaaaaaataaaaagttggtgtggtgtggtagtatgtgcctgtagccccagttactcggaaggctgaggtgggagcatcgcttgaatcaaggaggtcaaggctgcagtgagctatgatcatgccactgcacttcagcctgggcaacagaatgagactctgtctctcaaaaaatgaaaatgaaataaaataaaagaatcatcagtgttcaactacttactatgagcactgataattaaagagaaaaacttaactctgcccttttaggaggaatttaatagttcatcccctgttgatgggaaagatgtcttctatattgaagaatgtcaaccaataaaagcagatcagaatgacagaatttgaaaatgaccatcctacaatccccaaagaaataactgatccaggcaagggtcatcaatgaatgcccagaggattccacaaaatttccttttgggggacaggatattcactgggtgtcaaagcattacccacagaatgacatgctaattgcagaaggaaaatacaacgtttgcaatgggcagcagtggtcaccaccttacgaagtcatccatatctaataatagggcaccctgatatcttgtaacccctggatgggatgcttaatgaagcactcagaatcacctgggacacatttgcaccaaaatgttgagtctgaatccaatgatacttaagctcaaacttccagaacaggagaaaaacagggaatagcaaaaacaaggtaagacaccacaaggaagtgacaagacagaccagaacaggaagcattttaaatggcaatgttttatatatttatatataaaaatatgtatacatatatatagaaatatgtattatacatatattcacacacatgtgggggagggacactgttctagattaaaagctactgaagagatataacaaccaaatgcagtacatgaaccataacaggatctagtttgaaaaatgcagctataagcttttgggggtgggggcatgacaggtgaattttgaacgagaactgggtatcagatatgagtatggaattaccattagttttctaagtgtgatactggtattatgattaggccagagaatgcctctaattttaggagatgcatgctgaagtatttaggggtgtcatgctgtctgtgacttaccaaatagttcagcaaaaacatacatacatatttatgtatgatgaggctctgagaatttaagtgaacagctcaaggtagcacaatcaagatgtggaaaaatgataaatatttaaaggtgaagtgtcgtgatgtctataacttattttcaaatgctacagaaatataaatatatatatatacacatacatatacatatacacacacacagtcgcataatgacactttggtcaacaacaggcccatactcagtggtctcataagagtatataataccatattttttactgtaccttttctatgtttcaatctgtttagagacacaaatgcttaccattgtgttacaacaattacctacagtattcagtacagcaacatgctgtacaggtttgtagcctaggagcaataggttataccaatgggaatatcatagagtgaacttacacaaacctagatggcatagcctattgcacacctacaaaatcacctaatgacataactctcagaacatatccccatcattaaggaatgcatgactgtatatttctttttctttctttcttttttttttttttttttgagacagagtctcgctctgttggccaggctagagtgcagtggcacgatctcagctcactccaacctctgcctcctgggctcaagcatttctcccacctcggcctcccaagtagctggggttacaggtgtgtgtgaccatgcctggctaatttttgtatttttagtagagatggggtttcaccatgttggccaggctggtctcgaactcctgactccgggtaatccacccgccttggcctccaaaggctgggattacaggcatgagtcacgatgcctggcctgtatatttctttataagacatatatacagatagatctttatatgtaaatatatatatatatatatacatatatatatatatatatatgaaaacaagacaaaatgtgaactaatgtttaattctataggtgatcatggtaccgttatttcaacctttttatacatgtgaaaaattttaacactgagctgcaagggcaaaaaagagaatggtgcagagtgggggttactactgaatattaaatgaaaaactttaggtgctcaaagatgtctgtgactctgcaccccagcggtagcattttttcatggaattttctctgctgacctaggatgctggagctaatgtcctaaggtgagctgtgttttgcattgtagctccagctatccacttgaacagaaactttaggagtccttccagttcttagaatcttgacaacttcaaaatatcagatggtgaatcaaaaaacctcataggccatctccagactgactttttaaaaatgaaaatacaaatgggaactgttgtttcatgggtatgaagtttcaattttgtaaggtgaaaagagttatgaagattggctacacaatcatgtgaatgtccttgacactactgaactttacacttgaaaatggttaagatggtatagtattttaccacaattttcttaaaaaaagaaaaagacaatacaggtatttcaaaaacaagatgcttagtcgaactataacactgctggttgaaagataacttaggaaagaaaaggggatgatatgatcgcttttcctccaccttgcctccagaagattctaatgcagctatgatgacaagacacatgtggaccatgggaagagtctgcagcagtgcaaggaggtgcgagatttgggggcaaagtacacgctgggcatggctagcatgcacagggtgcggagaaggtccaggcggggtggcccgagcggcagggtggcttccttagaaagtatggctggccctggggaaggaggatgaggggcaaggggaaggggagaaggggaagacactagatgcagagggcaggcagaggcagagaagggggcagggaaaggactccacttgtccaaagtgctgctgcaaagggcaggccacctgtccggataggaagggactgaggactttgaatgctgtgttaactggtcgatgagggagtgctgagaggttttcacttgaggaacaaactgatacatgtgaattttcagaagattaatttttgaagtggtgtgcagggaagatacagacaggaagaccaattaaatagctattataaaaatctaggtaggctatgaggcaggctagctgggatgggggtgggggagtggagagagatggagaggtgcagggaattgctaagatgggagggagggaggagaggaggagggggtctttctaaagatagtgatggggaaaacgcacaggctcggcttgctcttgggtctagtggagtctgagatgcacaatgacatctgtgaggggctgtctggtgcggcacccgggggtgggatgagcactctgtggaggagaggtcaggaaagctgcaggcatgtcagaatcgccacacacagggaccacctggggtgtgaacaggagccagggtccggagcaaatgcagagcaaaccgagggcaaagcctcacgctccaagggaggagctggcagaaagggcacaaaagcgggtgccatgaaaacttctgtgaagcaaatatgattttcaaaaagctgtagggttgtctactgtttaaagaaatgcccagtaactccatttggaaagcaaataagcccctactctgtttaaacctggcttgtgtaccgggtttgtgttctgccattaagtcttttgtctcagccactgaaagtggcaggactcatctgagtccctaattctctctgggtcctgccccgcttctgcaaaagatgatgaggaagggcacaatgatggaaggagtaactcaagggaacagaagcctggagtctggggacttggctaacagggctgttgtacatgggttggccaaatggattcaaccttaagcaaatgtaaccagttctggtgggcgtggtggctgactcctgtaatcccagaactgtgggaggctgcagtgggagaatcgcttgagcccaggagttcgagaccagcctaggcaacatagggagaccccgtctctaaaaataatagaaaaaattagccaggcatgggggcgtgcacctgtggcccagctacttgggagggaggctgaggtgggaggatcacttgagcccgggaggtcaaggctgcagtgaactatgattgtactactgcactccagcctgggcgaccgagctactgccccttcccacccaaaaatgtgaccagttcctcttttccagtggatcaccctcttcttgacagtctggctgggattctgtcccattaagtgtaaaaggtgcttgaacccacaagctccaggtccttatcagaagaatcaaaccaccagctggtagacaatggggtctggggcccatcgaaggtcacctgaaaccccacacagaggaggtgattaattaggagaggggacagcactgaggaggaaaggactgtcaaggactcttctggtctgtgaaaccactgagagagagacaggggggtgacaccagctcctctgggaccagcagggcaatcactataaaatgcttaaatgtcccagttaatggagaatgggtgaaatccaaagtcacgggaagtaaatgttgccacatcgccctgtcctcatgtgggagatgcattctgtgcctttcccagccactccaatccaaaggatcctctttgtcactgccctctcagagacagtgacaactagggcatctctgtggctgaagaaggtaaaggactttcacacccacttagcaggcatatcaccatcaaaaggacacctctaatgtggcagtattgaagagtgatctccgctccatcatcctagagagcacacccttcatgaaattactaacaatcccaatgccatgagggaaactgaacagcggcctagaagatgttcaaaaggaggaaaaagagagaaatcatcactctagatagacgcccctggagttgcttggcaaccatctttgctaacaccttctcccaaaaaggaacacagtttgcattagctcctgtgatttccctgaggccaggactctggccacagaggccccaaagctggggccttggaatgagagagcgtttccctgatggggagacccagggccctatcaggaggccactggcttacacagtcaagggggaatgaaaggtagttcagccttgccattttgcttaaagaacaagctctcttggccaaggatggtgagaggatgagtgaagtcaggtgcccaggtgcaacacttaaggggcactcactccgcacttgcagaagcccacgtgagcccctccttaaacaggtgtcctgggtgcctgcttgcttccccttagtcctaaccctgctcctaggatgacagacatcaggacacagtgcttagagcacagtctctggaatcagcctgccttggggttcagggcagctctactattccccagctatgttaccttgggtaaatcacttgacctctctgagcctcagcttcccaatctctgaaatagggttgataacaggatttgcctcacagggtggtcatgaggattaaatgcgaacatgcacatttagccctgtgcctggcacctagttaatgcccaataaaagacagctaggattgttacttaaaaacaaaacaaaacaaacaaaaaaacacataagttgggctgtgtttagcccaaaaggtaccagaaaaataaatttaaaacacaaacaaaaaactccaaaaggaaatacataagcagctccctagaacccctgaacctggatctatagaatcagaatctctgtgggtggtcctggcatatttgcttttaaaaagcttcccaaggaattttcaaggtaggcagggttgagaaccacttctctcaaccaataaacagtagttctcaaagttcaggaaacaacagagccacctgaggagcctgtttaaaatgcacgttcctggtcaggtgtggtggctcacacctgtaatcccagaactttgagaggccgaggtgggaggatcacctgggctcaggagtttgagaccagcctggggaatatagcaagaccttgtctctactaaaagtcaaaaaaaattaggcaggcatggcagcacacgcctgtagtcctagctacctaggagtctgaggtagaaggatcgcttgagccctggagatcgacgctgcagtgagcttgatcatgccactgcactccagcctgggtggcagagagaggccctgtctcaaaaaaaaaaaaaaaaaaaaaaaaaaggacattcctggttcctgtgcttcactcccggttgtttcgttttagtatgaccagcctggggccgggggcacgaagtaccctacaggacaacacagcagggtctccagaatgaacacactttgcaaaacattgaaacagattcattcgttttttttttttcttttttttgagacggagtgtcactctgtcccccaggctggagtgcagtggtgcaatctcggctcactgcaacctccgcctcccgaattcaagcaattcttctgcctcagcctcccaagcagctaggactacaagcacatgccaccatacctggctaatttttgtattttttttagtagagatggggtttcaccacattggccaggctggtctcgaactcctgacctcatgatccacccgcctgggcctcccaaagtgctgggattacaggcatgagccacagtgcccagccccagattcactcttgaaactaacagtacagggacaccagtccaatccctttgtctttattcggggcatccttaaagaactggagacatacaagttgacaaaagatgcctggtgagccccgggcatcccccggagcagtaagaacgcagtctgtcccctggaagtggcagctcttaagacaaaggcgaagacccaagtgcccggtaaaaacaacgatcatcacaacaaaggcttccattactgagtacctactttataccagatagcatctcatttatttccacaacaattctgataggtactattattcctactctggaaaagaaaagtagaaattgaggcttaatttaatacacagccaataaatggtcaagatttaaataatgctccattaaactcccaagcctgcaatgccaatgaacctttttgtgtgtggtaaaatacacataacataaaatttaccattttaactttttttttttttttgagacagagtctcgctgtgttgcccaggctggggtgcagtggcgcgatctcagctcactgcaacctccgcctcccgggttcaagtgattctcctgcctcagcctcctgagcagctgggactacaggcacgtgccaccatacccagctaattttttgtattttgagtagagatggggtttcaccgtgttagccaggatggtatcgatctcctgacctcgtgatctgcccaccttggcctcccaaagtgctgggattacaggcgtgagccactgcacccgggccattttcaccattttttatgtgtacggttagttctgtgacattaagtatattcacaatgttgtacaaccatcaccacagtccatctccagaacttttgcatcttccccaactgaaactctgtatcatggcaacactaactctccgtttcccctcccccagcccctgaatacccaccattctactcgctgtctgtatgaatctgactactctaggaacttcattatacatggaatcacagagtatttgtccttttgtgactcatatactttttgagaactggactatcaccttggtctgatataaccaaactgggaccatgtctccagcatcttccatacccctggaatgctgaactcacctgtggttaatatcatcggactgggtgtcctgtgtccccaccccaccccaggactctgtggcctgtcaatgccttgaggtaaggtcacgtaactcacactccccctacagttaagggtatccttacaccattaatgttcacagatttacaattagcatcacagaatcaggtacaccggtaagtgcttctgtgttcaaagagcctgtcatcgactcacttttatcttccccattatggtgacctggtgccacttcgtcctgccctggagagtatttatttggtttccatttcttctgtaagcacttgatcccttaaaattggcaagcagaattgtgttgagaaaccacaggtacaaggataaagtgtctccataaaaacattgctttccccacagcagaattccagcttcacttatagacgactagggcagccaggtctagcccctgaatattaaggatgctccgctgtagcctcagcccacttgcaagaagggatttcctgaggtttcatcattagttcaagcgcctcagggtccaaatccaggtccatttggcagtctgagctctaccacaggagagagtaagagaatgccagccaaacggcatcagctgggagcacgtaatcagcagaacactggaccgggagatttaggagacagtcacacacagaagtcagtccttgccattcctacaatattctgaaaaagtagaacccactggctaaagctctccctctccattacggctatgtttgattattgcaatcactcagtgaccactgtctccagatgtgaatagtgggccacctcagtgtgtggggtccttagagaagagggatttgaccaggacaaggtctcactgcattgagtactaccatcttatgcctacttctgaaatatgtcatgaatgaaacaaaatgtcataaacgaaacgttaacctgaaggatataaatgcaaccaacccggaaaaccatacagaaacaaatctgcctaacttttctaaatcaattctgcagcagagacggcaggcccctgggaaccgccggctgaaagcatcaacatggcctcacagtcttaactgatgctgcagaccacctggcacacaggtcagaaggcctcaggaatcagaccctcccctgccctttgtaccttcccaggcttaacatggaaatcatgaaagcagccactttgctttccgtcatgtgcatccccatttcagacatatcccgtgggtaatcaaactgcagagaacgccagttgtattttcagcctgactttaaatataaactgaaatccttactgcttcaccaatgcgatgtggtacttttgacatcgggggccactgtataataaatgccatcattaccagaattgatgctttgggtctcctccacccacagtgaaggagggttgggccacccagaattagaacctgcaactcactattgtcaccagtgactgcagactggactccaaggtttggaagagtcatcttgggaactttgggaggagggttccctgggggaccgaggcttctctctctttagatcctcccaaatgtagctcagcgccaggggatagtcacagtacaggtatatctgctgagtaatcgacaaggctgacttacatgggctgaaggcctaacacatggacagatattggcagaatatttctgtatcttagtctatttttcttgtgttcttacctctccagcctcaccagccagtgattctctatcagagcgatttgtccccctgggacatttggcaatgtacggagatatttttggttgtctaaacttgggggaggggagggagacactgctggcatctagcaagtggaggcgcaagatgcggctcagcatcctgccatacacaggacagcgcccccaaaaagaagcatctggctcaaaccatcagtggtgccactggtgagaaatattatactactgtgtgctttgctatctttactccagcaagaggactttttaggttcagaacagtctatattctctggcacttgggcctttatccctgtcgtttcctctaactctgtcctgcccagctctacacatgggtaacttcctgtatcctccaggttttagcttacataaaatttcctctgggaggccggcactgagcccctacctcagtgaggcccccccaccatgacctccagcagcacctgagtttccctatcagagcactcatcgcggtctacctgtactttcgccaccaggctggaagcaccctgagggcaggcaggggttgtggtttttcactgctgtgtccctggtgtctagcccagttctggcacgtcaggagagctccctccaggtcaaacacataagggaggctgagaaacagttgagcgtattaaaaacttggcaagacacccagaggcttaaattgttaccctactatgcaggcaccaaaagagaacatggcgacttctcatgaactgacatggacagctctctaagataaatggaaatggcaagatatcagctaatactataggtttctatcattcacgtgagaacaagaagacaaaattatatatgtatctacttgaatgcacacagaatatctttggaagaatacacaagcaactggggatggggtgggagggagacttactttccacttggatagccttttgaattttgtaacatgaacattattaaaaaaaataagtagttttaaaatgaatgtgtatgtgtgtgtaatggtctacatcttctagcagtaaaaacattattctcatagaatgatacaggatgagaccctggtacagggcaacttagaaggcaaattatcatatacagtgtttccgtgtgtccattctagcttcctgttgtggaagtagacagagccacatttcttccacacgggaacccaggcacaaggaaataattgtatgtataaagaaatactcattttggaagctttgtattttccaaactagatgatcaggatgtcctttctcatctgtgttgtgttggttgtggcatgcccctgctccatcagtgggctgcacctgtagagcttataggtctccaagcccttcccttctccgtctcatctttcctccctaccacctttaagccgctccatctctcccatccttccatcccaaaagctgggccagataagagagatgataatgtaacgccaaagtgaacaaatgttactgcttgttagcaaaaggggaggaaggtaggcttaatggggaatgaagttgaaattaatggtaaaaatgaggtttatctgtgtaatctgtggactttgtgtcttcccatctcctattaacatagataacagagttgtctataatgataaagggaagctgttcgcagtttcccataaatctccatggcctgctgctggcttctctggcttggattctaagaaaacttcattcttaaccaggtcagttgccaccttctccaatttgctcccatccagccacaactgcaagactcctaagcctgagctgaacatgctcctatgttctctgcaccctcctatattccagcccaattccaccagcatctcagaagaacagcaaactcttatagtcacagcaatatcttactggccccagcacaattttcaaattggaaactttccaccagtttatctacatcacatcaaaacatgtgggaacgttaaaacacaggcaagttttcaaagtgacaagtgtaggcttccaagagacccaaacaggaatctattcaggacttttttttttctcagtgataaaataaaacaacttatcgatcattgaaaaaagttttttagatctcccagtccctagaaagaactttgtataaactcttcttagccataggccatatacagcctaagtattattcgacagctattgataaaacttatcaatgatcacttaactgcactctattaaaaacattgatatctggccgggtgcggtggctcatgcctgtaatcccagcactttgggaggccgaggcgggcggatcacaaagttaggagatcgagaccatactggttaacacggtgaaacccagcctctactaaaaatacaaaaaaattagccaggtgtggtggtgggtacctgtagtcccagctactcgggagcctgaggcaggagaatcacttcaacctgggaggtggaggtcgcagtgagctgagatcgcaccactgcactccagcctgggtgacagagggagactccatttcaaaaaaaaaaaaaaaaaatttgatatccatagaaattgtttctttaaaaaatcattagtgtcataaaattacaacaaaatggtttactctaaaaataaagtttctgctacgtatcttttcttttcatcacagattagtttaaaatcctaattagaataaagttttctagagctagcttcattaataatgataataatagtaaaagccaacattcattaagcacttactatgtgctaagcccttttgtattatctcatttaatcatcacaacaaccttattcttttctgtcttatagttagggacacttatgaggcacaggaaccctattccttatctatgaattggtattctttaaaaaaaaattcaggtgaggcaaggggaacatctttctaaatcactgagagcttttccctaattagcttgaaaaagctgaggaggaaattatttgaaaaggttagcacagaagaatggccgtccttggaattttctctcataaacacctttcacagattaggctaataaggtttctgggagtcctcctctcaggaaatctgaatgcctgactgatccaagctgactggggtcaaatcattcctcactaggggaacacattgggttttggactcagaaccccacttttctcggaatgctgaaggccaaataccattcacaaatgatttgcagcagaatattgcttgtgtatgagatgcagtgatttttgccaccaagaagttataaattgagaaaataaacccagttatttttgaagtagtttaagatatttttaatgtgagggcttgggtttttttttttttttttttaagtttctttagaaacagtttgcctgctataactgcatctcaaaggaaggtacattcaatagagaagcttgggttcagaggtctcaaagggaccttagaggacattcagttccacccccctttctttaaatatgggcaaataggccaagagaagtgaaacgacttccaaagggcatagatcaaaatgtaggaagctgactcaaagtgctatcctgctccttccagtacccaggttgtcctggatataagcccatctaagcatatccacccatggatctagcaacgccttctgaacccaggtgatgacaacattcaaaagtatttggggccaggtgcagtggctcatgcctgtaatcccagcactttgggatgctgaggcaggcagatcacctgaggtctggagttcgagaccagcctggctaacatggtgaaacccatctctactaaatatacaaaattagccgggcgtggtggcgcatgcctggactcccagctacttgggaggctgagaaaggagaatcgcttgaacccacgaggtggaggttgcagtgagccaagatcatgccattgcactccagcctgggcaacaagagcgagattctgtctcaaaaaaaaaaaaaaaattggcaaattcctcttagctataatttagctaattttagatgaaataataacaatgacatgaaaactttattacagacatttcaaagcatccagttaacatttcatactttataggtggagaactgaaagaaatggaaagaattgaaagaaagtttaaaggggtgaggaatggggaactgtattacagtaatcaagttattcaaaaagtctgcaagtccttgctgtgtcttctgaagttgtggccagatagaggtagaaaccaaaataatttttttttttttttgagctggagtctcgctctttcgcccaggctggagtgcagtggtgcgatcttggctcactgcaagctccgcctcccgggttcacgccattctcctgcctcagcctcccaagtagctgggactacaggtgcgtgccaccacgcccggctaattttttgtatttttagtagagatggggtttcaccatgttagccaggatggtctcgatctcctgacctcctgatccacccaccccagcctcccaaagtgttgggattacaggcgtgagccaccatgcctggccaaaccaaaataattcttatttcacatttccagcctaacttctcttcctgagtttagtctattaaaaatatatgacaccaatgttcatagtggcattactcaaaatggccaaaatatggaaacaacccaaatgtccaccaacagataagtggataacaaaacgtagtatatatacacaatgaaatattattcagccttaaaaaggaatgaagtactgatccatgctacaacatggatgagctatgaagagatgcgaagtgaaataaaccagatacaaaaggatacagattgtatgactccacttatatgaggtatcagaataggcaacttcatagagacagaaagtagaacagtggttaccagggctgagaggaatggggaatggggagtgattgcataatgggtacagagtttctgactgggatgatggaaaatttgggaaatggaaagtgatgatagttgtgtaatattatgaaagtacttagtgccactgaattgtatactcaaaatggttaaaatgataaattttatgctatgtatattttaccacaaaaaaaaaaaaacatcaaaatcggaaccacccgccgggcacggtggctcatgcctgtaatcccagcactttgggaggccgaggcgggtggatcacgaggtcaggagatcgagaccatcctggctaacacggtgaaaccccatctctactaaaaattcaaaaaatcagccgggcttggtggcgggcgcctgtaatcccagctacttgggaggttgaggcaggagaagggtgtgaacccgggaggcggagcttgcagtgagctgagattgcgccactgcactccagcctgggcggcagagcaagactccgtctcaaaaaaacaaaacaaaacaaaacaaaacaaaacaacaacaacaacaaaaatcggaaccacttcccttcaattcccagttggaatttctaaactgtattttgttcattcattcccattaaagccgaatttcttctcaagacctgcttaaagccaacagtgtcatggacaatctacatacattcataagcacaggtacacagccacacacaggctactttgtgtcctgcagtgacccatccacaaacatgtatccgtcccaggactttgttgatcactccaaaaagagggcccatggcaagcattactggagatccaggtaaccaaataaacaccctgtctcagctcaacccttcaatttctcaccatgggggaatacgtattcagtatatagatattttatctataaagaaaactgcatgcatatataccagaaagaccatcaggaattgctcacccaagtctgttccaccaggcctgtgaacaaagagatttcagcccatatatggctattttggtgaagttagcaatttcaagttacactgaacagtgggtgtccttaatgcaaatatgtataattaggagctaaatcttcgtacctttataggacaaaggacctaataagcgggatgtaccacctgtgacttctgaggaaaggagagcttttcattttttcttaaaagaatccgtttctcagccaggcacggtggctcatgcctgtaattccagcacttcgggaggccaagtgggcagatcacgaggtcaagagatcaagaccatcctggccaacatggtgaaaccccgtctctactaaaaatacaaaaattaactgggtgtggtggcacgtgcctgtagttccagctatgcaggaggctgaggcaggagaatcgcttgaacccgggaggcggaggttgcagtgagccaagatcgtaccactgtactccagcctggcgacagagtgagaatccgtatcaaaaaaaaaaaaaaaaaaaaaatctgtttctcatgaggcaaagagaatctgagaacaacagtcttctgaaatagaaacagggactggggggaaaggatgtgagttttgtgtgtgatagtcataacgcatcacccagacctgagaggtgacaatcctgtgctataccatgacctttactcaactttaatttaaagatttccacagcctcatcatcttttatggacacgttgccagtagcctgataactgggtcttgcaagcacttagagatctcaagagtttgtgtgtgaagaaaaataatctctagtgatgcttcccactgccaacacacatgaacatttaacacaaataagctgccacttgtaagaagtccacttgacatcaatccctcgtgcatcctgaagacacctgtcaagatcacactaagatatttagaagcaaacatctttagaataatgttttgttcccaaagtgcttaattagcagaaacattatgctagggaactgtccttgaatatgtacgcattttaaccttcatgttattttttctgaagcacaaaatttcctctcagtggatggtcaggaaatgattgggcacagaaaaccaaccatctgaagtgttgattcataaaatgagttccatctttccacgcaggcttcagctgccttccagggtgacatccctttttatgagggggaccattctttggcatctaatggccttttctccattcatttgggatgaccaatgcacctatggcctacttatgtctgaactctttcaataccaccaacctcttctgtccccttgtgccatcttcccacccccaatttcagccaattatgtttataagacatcagttagtgaatcacaattcaaatgaatccacctatttgcttagcagcaagtggcccccggagttgctccatttgaagcccataggccagagttacatacggcaggcttgcaaatgagaacaggatatgatttatttatgacgaccatatgtgtttgatgcccaattgcagcaggttgtggcttctcttgcatatcttggtctgggatgacctatctactcagtgtgtcccatttcaggtaccgtatttccatgctgggaaaagagagatgatgactgctgaggggctgcacatacagatgctcctaaccctgcttgccacataacaatctgtgaccaaatgcaaagtgggccaaatgtaacttgctgcaaaggtttgccatgtacaatggttttcagtggtgagtggagaagtagctgctggaatgactgaccatgtggggttcattaagctgttgtgcattcacccacgagaaaggctgggatgcttgtgaagggaactccactcttcatttcagaaattttaacgccccaccatttggcaatgatgctcccaaggagaatggcagatatgcatcagaaggttcaaacgtggagtccaactgaagtgcagtaaacttctgccttcaacagtctcacccccctttaccccccccccagttgtatttatactttgaaagaagttaacatgaagcagtagtcacctgggcgtgctcaatttttgacaagccttagtcactctgtacccagcagaacaattcacattatattcgaaatcctgtgaagattctgccacacatgctaacactaaaatgccagtagctccacttaccttctttattaagcctcataacctccctgctttttccaccctcttttccagcctcttctaaatctacatctgcagatgaaaaagaaaaggaaaacagaaaataaggaaaaaaggggggaaaaaagccaaagtcaaggggggagggagagtgtttatttgcaaacagatcgatataaatactgtatatgaaattctttcaaaaattgacaatgcaacattttctcccaagtctgggtttccatctacctggcccagataggtacccaaaaaactatgcaagcagcaacaaagtagccttttaaacggacaacaccgtggggctgcgagcccaccccgcgggctgccacggggagccgggcacagacagacagacagccctggcagccgggcctctccctgtgcattgatgatctgtctctgtgtgtatttatttagagagagagggagaagcatggaggacaccgggggccactctctctctcacacacacactttttcccagtggctctaggtgaatggaaaggttacaggataataaaaggaggaggaggtggtggggttcttactgtcggagcagtgtaatttggcggcgtcgatccaggaggaccagggtttgcccagaaacgcctccggactgggcactttgcgatccagtgtcgccattgctcttccttcttgttgctttttccctgttccttcggcagcagcagccgagagacacgggattcgagaacgctccgacgtcatcttcggaacgttccgacattgagtgttctgaaagggggagggagggaggaagggcgggatgggaggagggcggcggaggaggaggggagagggagcggaggaggggcgggcgctcgggctcccggagccggctcggtggggctcgcgcgcccgcggccgccaggggcagcagagaggcacctgcagtccgcgcccgcccgcccgccggggccgcccgcctgccggggaggggcagcgcggacgggcgagcgccgcgtgcgggagagcgaaggctgcagcgcgcccggcagccgggatgcagcggcgccgcccaagcctggggcgcaggggtcggggcacacggggataggcccgacgcggggccgaaggaagggtggtctttcccgcagagttgccgctggaggaccgaaagttttgcaggcagcccttgcttccagcttgtcgctctctccccgcgtccctgtcgcccaacgcgaggcgcccccgctggggtcccgacggcttggtggggaggagccgtgaggggttgcgccccccacccccacccgagccagggaagggaccctggtgacctcgcctcccagccctcacccccgtcacccctttcttctctttcctggaggactttggaccatggagattctgcagttgttgctctaggagctgaaaccagtgggtagatgtcgttctgaaacgcaggtgagtttggagcgctacgagctaccttcccatctcaggctgcggggcgtgcaaaactcaaaagttagggcccccggacccccgggttccccgcgcggtgcgtatctccggctctcagagaaccactgcatggactttgctccagggtcagcagagcgggagggcgaatttacggctcttggaagacgacgctaacgggcctagcccctgagccgtttccagcgctccctgccgtgagacgagggtggcccgggtttgcgcaggcaacctttggccaggaatctgattcctgggagaattcacttcaggcttaactgctctagccagctagaaagggagcgctagatttcctctggattttggacgttgggtgctttagttgagattttcaccctttaaagaaggctttaaaaagtcttctgttacttctttttaacaaatccttttgtttactagaattatctaaactatatggacaccgccctcaccccacaagcgacatatttttttttctctttcgccagcacccttttagctctcaccactgctgtttcccaagttgtcacagctgaagcgcactgattggaagttgctttgtactgactgagttctgccctggctgaaccatctaataatttccctgagcttggcaccctgtatcgctaagccagtgttaggatgggcgatgaaggaggagctgcggatttgcctttagttgtgatgtttgtgtgagtcggcttgtttgtgtcagactcagataaactgcatttgcctttgctctctttcgaagggctcctacatagctaaggtgtcgctgggtgaagaatt

SEQ ID NO: 52 - DNA, 1196980 bp, Homo sapiens
  source 1..1196980: mol_type = genomic DNA
acgggtcctcgagctggggcggcggtcccggccccttcggccccgcccctcgcccgcggccgcctccgaggttcaagttcggcccccggctgttaggcctcgcgctcccggatctgaagccgcccgtgcgtccctaggtcccccgctggaagacgaggcgggaatcccaggggtcatccgggcgcggggtcgctcgtccacgcactgtggtgccacgtggaggaaaagtttccaactctgccagttggtgctcccactgcgcccaggcggagcaaaggcccgcgctttggcacccgctccccgttctgtctcctccagtcgcgccccctcccagggacgccccccttgtaccccttctctgaattcccttctctcctcgcagcgcaggtagccaagggaaaacacccttgggggctggtggggcttcccgagaaggcggcctcgggccggccaggggtagaggatccagggacaagtgtcccgaggaggatgtggggggcgcgcgcgcgaagtggcctgggagcaggggcccacacgcgtccccgctgcgacaggcgggatcctccggcggcttccacgccctggcgcgccaactctgcccggccgcggccgaccccacgcgggcgccccctccacgcccccgcccccgcccccctcacagctccccaccgcccccagtgcgcaggcccggccgccccagcgcgcatgccctgggctcgcgagcgcggccagcccccagccttttgctttctacacactctacaactggggagggggcgggggaggagggagcccagccgtccacgtgatcccgccggccggggccgcgggggcgggagcgcgcgccgagagaggcgcggggagggcgggtgcgcgggagcgcgcgcactcgagcgagcgagcgaaagcacgaacgagcgagcgagcgagcgagcgagcgggcgggcgcggggttgggctgaggcgggcggcggcggcggcggcggcggtgggctggccgcggagggggaggagcgggagctgcgcgaggcaggcgggcgggcggaggatggggcagtgcccgggctcccgctgcagccgcccggggacacgccgtgcaccctccggctcggggctttctcggcggcggcggcggcagcagcagcagcgttagcggcggcggcgagagcagcgttcccggctgcgcttctccctcaggcggggcggcgagagaagcggcggcggcggcggcggcacaccggtgtctctcccgctggagatttctttctgctttcctcatcgactgactgactcaccccctcccttttttgaggaagggtgacctcttctctgggactggaaaaaatatttttgtgaggaggggggcgggtggcagcgacagggtttgcttcttctcttctttcatctccctctcctcccccctcgaagaccgaaaagcaaaccccacaactgctccagcagcatcctccttcccttcctccgcctcccttctcctccgccgctcgcagtttcgccctctcttccgctaatgattgcattattatgctcccctctctggggggtctcgcccctcttgggtcgctccggagccccggcctcccctggctgcatttcttaaaaatttgggagcctgggagtgagttttctccgaggcgtgtgtgagaggcggcgggggtgttttcctgcgcgaggggcgggtgaagttcattgcccccacttttcccgcgacctttttcggacccgattttggatcgagttgaggggggcgcgggcgttttcggggggcggggggcgcggcggagaatggccgcggggagggctccccggagcctcccagtctcttgatcaaagcattccgctattctgatttattgcttgcttggtgagttatttttttttcctctaaaggagacctgtgtgttcagccattactttgctcggcgctgctcccaggcatctccgaccctcggtgctgtggggagccccacacttgggctcctcgcctctcgccctcgctccccgtccctcctcccctctctccgccccttcccccttttctttctcctctctttcttcccctctctcccttctttcggccgccgtctcccccgcgccctcctcggggcggagggaagccgtgaagggggagggagggctcggtgtcaatttttttttgtgtggctgcggccgtagcctgtggcgggcaagcggggagaccccggcgcagcagaaccatggatggcccgacgcggggccatggactccgcaaaaagcggcggtcgcggtcgcagcgagaccgggagaggcgctcccggggcgggctgggggccggcgcggccggcggcggcggggctggccggacccgggcgctctcactcgcctcgtcgtcgggctccgacaaggaagacaatgggaagcccccgtcctccgccccgtcccggcccagacccccgcggaggaagcggagagagtccacctcggcagaagaggacatcattgatggatttgccatgaccagctttgtcacttttgaagcgctggaggtaagggggaccccccttcccccgggttccctttatgcacgaccccactcggctgcgcccggctctcctgcctccctcgccgcgctccgggctgtctgtctgtctgtctgtctgtctgtctgtctaggctgaggtcttattgttggtggggggagctgggggcgcgggcagacaggcagcaggagggagtcgcaaagccgtgcctggtctcgtttcctcgctcgcctttcccctgcgccccctccctgcaccccctccacagcagatgggcagaaagaaaggggttcgggcatcacaacaatgcgccccctctccacagagagctctgcccccactccttcctcctctccctccccaatcatggcttcttggctggtggaagtctctttgctgggtttggggcgcctgtggacggttctgtgtgctttctacagagtcatatgttcgtgtgtgtgtgtgtgtgtgtgtgtgtgtgtgtgtctgtgtagtatatacctttcccgggtgtcctcgggactggagactgatggggttttgtgatttctttgcgcctccccccattacccccccatattctttttttttttttttttttggtgaagctggggaagggggcgttttctcctggttgggagaaaggagggaggaggggagagaagagggaagggtggaatagctctctgtattctgtatggggttctgttacagaaagggttaattataatattatctatacacatacataggcacatgtgtgtgtgtacatgagcaatttagttaaaggacagaaaaaggtacaccagggaagactggtgggagggaagaataaaatcctagctgctatctgaagggcttgtcaccaattgtccctctccctttccttttttgtgttttcttttttttctttctaagtgattggctttgtgtgtgtctatgtgtgtgtctttctttattccttgggcacctgcagcgttgattttcaaatgcacattttccttccagccaactggctcctagggtagggggaaagggaaaagggagggagggggagactgtccagggttggggggaaactgtctttgcctggacctgtctcctttggtgtggtattggtcattggcctctataaatttaaccgcctaatttcctcccccacctccctgtccccaccccccacacaccatgcacacacacacagaaggctttgagattctgcagagttggtccacctttcttaagcacaaaaccaagatacggtttatagttggcttatagtgtttcatgcacctgatgtgatggtttgaggttcctgaaggaaacttttccctttccatttttttttttgcgttattatggtattgtttcacatgctcagatgcaagctttgttaatgacagcttaaatctcacatacggtaactgtacaggtttagattgctggttctgtttatgtgtttgggtgtcagctttaaatatttttttcaaaggaaggcttcctatcagtgttgtccttttctgtgtgaactgcttttggtttgggctgctggtggtgatggtggtggatggtggccagtggttgggagtaagggaggtattggtggtggtggtggtggtgcaggtggtggtgatggtgatgttggtggtattggtggtggtcgtagattttgatgttagtgattgaatcagttactctctggttctagaattggtgctttattggccaaaattttgagtgttgaggttcaccacttattagaataattccaactgtggctttaagtttgccaaggtgggtggtggttaccatacagtgtgacctctttctgtctctctctcttgttttaaaataggagttgaaatggcagcatgttcctattagaacatgctgcttggaatttggttcatcattgctgtctgtggttgttttggaaagtacttgtaagagctggttacaagtggttctgctttctgcatggttatcctgagctcagcaatcaagaggggccactggattcccacgaacatttttggaggacaagtagggatatatgtgtgtgtgtatatatatatatatatatatgtgtgtgtgtgtgtgtgtgtgtgtgtgtgtgtgtgtgtgtgtgtgtgtgtgtatatctcacttatgcagttctttttgatggttttatttttaacaaataggtatttgactgggcttgtgatatatatctatttatttggcttttgcgagaaaatgtgctcattttaatttattttgtgcctaaaaaacttgtaattttaaaagcagaccaagttcaaaatgtacagttaataccatttctttctttgctctgattatttttttctgctacttttctagattaaaatccaggatattttggttagctgaatactatgtcaccttcatatctaaatatcatatgtctatctatgtgtaggtagaaaaggtctaacttttaaaaaagtttacttaaaattctgtagaaaaaattaaacatacagaagtagacagaacacccaacatccaggtttgagaactaccaactcatatctcatcttgtattttctatatttcatctatttcctctcccacatatgatctcatccatatttctcacacagaaatacttctgtatgaatccctaaaccataatgactccaaaaatcctcagaccccaccaaaacccgcacagcagtattatcacacttaaatgaatgtataacagttcactaatatcaaatatcctgtcagtgtttacattttaagaggcccaacttttgtagggaagccgtaaatacatttgtcagattaaaaacacacaatgggaaatagaaatcatcatatatgtctggttctttggcaaaaggtagttttgttggctgtgtgctatcacattgtgtccatgctggatggtcagaacatatgtgttagtgattgttaaattaaaacctctggtggtccactctattcagtctggaagatttattgaactatcaccaagaaatgtgagggcttattgggaacaggcaactaaactatgagcttggacaaaaatgtgtgttgggggagtgtttgtaaaagttaagaattattatagatgctaagagttatcctaaatacgtagtatgttttcgggccttgtgtttagaaatgaaatcagttgtcaccacatgtcattaaggctgctgctggtatgatattgtgaaaagaaaccagaaatattggcttgcacagctaggtttatagcttgtgccagttcagagcaatagctggcaaacagtggagtagcatactttgtgtgttaatggacacattatttgactccatgattttgttctgagtagctggttttggacttctcttttaaaaaagaggctcctaactcattatgaaatgtgctaatataaatagttccagttcaactgattttactgatactggagtaaaagtgataacttgcctaatgagaacctgcatttttatcttgattattttttgctgttgttggattcttttttgagatgatgaaagctttaggggtagtttgacaagtctcacattttataggcagtgaaactggctgaaacagtttcatattcacagggacacttctcttgagtaattgtgccctgaagttcaagtgtatgattatgaagagcctcatgatagaagataagagggtaggcgaggaggctaaagttgaacatggtgttcttttcattatgcagttgagaagcagaattaacgttggtatatagtatattgtttgtttggatattcttcgagtgacaggatgagagcaaaaatccccagataagatgtctagttttcttaaaaagtggcttttagcaaagtataaatgggaatgttggggtcctactaccatcagtgtgtcctgatgtgttagatagtgttggctttctgctatttgggttttttttctgtgttgtgtctattaggaagccacgtgagtaccatggctgaaaacttgactttgcaaatccattatttttcccctcattcctcttttgtgcactgggttcttagggcagcctccttttgtacagctgaccaagggaagctaagatgaaatttgtggaattagcagaaaagaggccaattggagctttataggcttatgaaagtaaaggaagactcatttctagtggttagagcatcaaaccaagactttgatgcggtcttcacttcctggctctgttttcagggcttcccccacacatcagtagcataagtgggctatacagaatttggtgtacttataacatgccatgttaataggctctcacaatttattatggtcaaatcactttagttgtttaaaaaacaacatgagtcacatgccttctgtcagtctgcagatatttatggagtgcttaatatgtacaaggcactaagaatatagagaaaccaaacataaatctagcgttttgagaaagtatgtagtttagttgataaagccagcacctatgaaataattttgaaacaggtacttgaatgcctgatatcaactaagcgccataggcttttagagacaggctagtgagataggctgaagtgttccagaaggcttcatgggtggggaatgggacctagaagggtgaagtgatttggatatatggggaaggagttggagctagggagagcattctaaaggaataatgaaggcacaggaacaagatgctacatggttaggacttgggggcaaggaaaggctggtggaaatgagtacaaaggtggtaagtaaagagtgcttgttagtggggcaggagacctgtggagacccacatgccaggcttggcctgcctaactagtgtggcctttgaaagttaactttctaaaagcatcatttcctttatccattagtggagaggtttaaactagtttagagtaaagcttctcaagctggaagggaacatagctttacaggatgttcataaattgttttttagtctgaaacagagtgatctaccgccaaatagtttctgaaacttgatgggctagacaaaattaaatggatgccatgttctgtcagaattaaaagtctattgtgtgaatgtgaattttgaatatcagagaaggcaatgtgttgtgcctaatttcctaaatctattttgaccacagagcacttttattctctgcattgtaatctataatccagtatgggaaatactagaaaggatccaaaaaagtccctccagatcttggaatctggtgatctctgagtctggggtgagtgggctgatggtagacgacttggaaaaccaggcacagaagcttgtagtcggtgcgtgggagctgcttcttaagcaggagtggcaaggggagtgaaagtgaggaagatgtaaacagtgagggagactagtccatgtcttttcctgctcccctttcctgcctgacatctgcctttttactgattgttaccaaccccaccaggaggtgaatattggtgagtggttctcattaatagctctttcagtgtgatgatactagcccaattctgatgccaccaagctgcccttcagccaatgttttatcctctttgtcccttctggtttcatatattgctgctctttggcaacctgtaaaaaaaggttggttgggaaaggaggttgacattgatgttaaaacaacgatttcaaattatctgcctttggcttgctgtatatgaagtggtagttcaaaaaagggtcagaaccgctcttttgctgttacatagccaggaaaagctgtggaactgtgtttctgttgcatttttcactttcttttttggaaaatttggccatgggactgtaaaataaatgggtcagttccagcatttgacttctgaaagtatgcatagctttaggatctgagaagggatgagagaatttggaggaaaggaagggtgtgaatagtgtgtgtggttatgaattcaagtattttactgtacttactgagtttcattattttactttataaggcagagcatcacttgaggagtatttatgtgagatgtggttgaacgttgtgatatgatgattccatgcagcttttgttaattgtggagattaactacttgcaccttttttttggaattagaatgtaaatgaatccgtgaatttaaaaaatgaattatgaggttaggaattgagcctttgatcctgagagtagtgttctgtagttctcactgttgaaaaagggttaagaaaacagaacagtaaacatgattcaaggagtgttgagggtgatagattctgagactcttctacaccacagttttatgtattatcaaagataaatggtgattatttagttttaaagaatgttaggattagaaatgaggtccccagatggacacaacaatagttgaggctagctattaggaataatttaggtctaagagctacgagatttggaagcctttggacgagaaggtctgtggcatttcgggtgtttgtgtatgtgtgcacgcacctgtgtgcacgcaaagggtgaaggatggtgggttagtggctttacattttattttattttacccctatcctgtatagtagtcataatatactaaatgcagcctaactttgtaaaagtgtttcatgctgtttttttcctcctcaagaagcaacttttttttttctttcagaattaggattaaacccaatatgctgcagatgtaggataaagaacctagtaatgggagagcaactgttaattttagaaagttctgaaaagattcaggtagatttgaaaacttagatcattgaagtttagaagagcaatatgataatgaatttggtaaaacttgagacaggagaagatcaaaaataattagtgagctggggcagaactgttttctcttatataatcagaacctgttccatgaatgtagacttttttcccctctgggaggtgaagaggacatagaatttaagactggtgagaccctaagtgtgtcttctttcttccaaatctgagctgtgttctccttcgtttcttctaacacaatagcagagtaatgatagtttctattatagctttgcatctgttggtatgcaattaatacatactgtgaggtcacaaagaataggccctttttatgctattagtatgaggaggggaggagtgagttttctagaatttgactgcccctgcttgtttaggaagaaactagacaagtacaggcttctgtgtcttagtcctgttcaggtctctgattccatccattgcaaggggctctggaccctgaaatcatatgaattggtgccttctttgaaggtgtttatttcatatattagtgtatgtggctctcttagggtccagttagattccccgctcacctgctgcccacctccctcctttcctccctttctctctccttcatatccttcttctttctctctcttcctttactgaggtagagctatcaaaattatgaatgctgttaataaaaggtaatgcatttaggacattgtgtatgaaacgcagaaattcaaaaatttttaaatttcattatttgaactgtgacaatctgcttgaggaactctaatttagctctctaaaggtgaattgcttgccacagttttcttggccattacagctcacttttctaatttctcagcttatgtctgaattctagttagtttgtttgccagagcaaaccttataaatgatcaactacatacaaatatttttaaaatgacttaactgtcattttagcttgcactatacctcacggtgccatacccccttgttacctctggagccctggaaaacccatgtgcagtaaaatggagtcacaagagaaaagcccacagtttgtaagtaatggaaaattgctaatgcaagttgggattcatttttggcaaaaagtctttaaattgcaagtattgtgtggctgctattaactgaagcacagcctgcaaatatagattgtgactcttggttacatgggtgaaatctgatattttctttcttttattttgtttttttgagacagtgtctttctttggttgcccaggctggagtgcagtggtatgctcatggctcactgcagccccaaccttcctgggctcaggtgatcttcccacctcaccctcccaagtgctgggactacaggtgcatgccagcatgcccagctaattatgtattttttgtagagatagagttttgccatgttgcccaggctggtttcaaactcctgggctcaagcaatccaccctcctcagcctcccacaatgctgggattacagacgtgaggcactgcacccggcaagaaatctgatattttcaaactgtggctaagttctaaacctgagactgagttttagtcattgccagggacaagttgtgatgacgcctgagggatctcattttccttgttgtccccacacctaccctcgtctgcagcacaaaatctcattttaagtttttgtaaagtttctgatggcagtaatattttagaacttaaaaggaggaattaagagattacagtcccatattataagtatttcttagttgttatgttgaagtagacttcttttttcttgttttcttctagatctctttgttcagttatactcgttggctaaaggttgctggttaaatgttgtttagcgaaatattctatagttaaaatctttacaaagaaaaaagtaagaatgaagatgtggatagcacaataattgaacattagattattacttgttttctagccacatgatagaaattgcagtgacttccacccattctgtctgtacatgttcagttggcaaagagaatgaaggtcctggaccgtgcttttctaagaaatgattttatatagttgacattatactttcactggagcaaaaagggaaacaagcatttgattagtgtgtcttactgcatattgtggtctgctccctcatttgttacggtggtcactatgattgcttgacaattacagttttgagattaatatgcagagctaaatctttaggaggtatcctaaagttaggacctaaactttttcatagcagccttttgatccattttattccagccattgctagttgatgtgctttctaagccgtgtggcatcagaggcacagatgttgtctttagtgatgtagttctacctctcattttgcaaatgaaaacaacagcccacaggggttaattgacctgttcaagatcacactgggagttagaggctctcactgttaccctatgaatctaggagtctgcttcttgtaagttagtactggggagtcccaaggattgggaaccttggaaggagattttttaaaaacaaaaagtcttactacaaatgtggatgagcacccatgattgtaaagcttcccatttcagctaagaaatgttctgatttacacaatatcaagaacctttaaaaagcgttgttctctccctgcgctctctcccagtgtatcaccctgaaattagttggcctttctctgtaggtacattcatcgtttttaaacactgcctcccacctcccttttataaggatgtaaaataaaaaaataaatattagggtggtttctcatcattgaatgtctagtggaaagataaaataattatttggaagtaagatgaccttaatgtggcccatgtaaaatttttaacataatttctttgtgtaaaatattttctttagcctagcaatctgtggaaactcagagcaacttcataacattggtagcaggatgtatggagtgagtgaactttggagtatagtggagttgaaggctcaacgaaaattttcttcgaggaaatacttaaaatattaaatccacatgacgtgttgactaaggcatcttgtctgttcattgctgaaccagaacatttataacaactgtttctcatgtgtatgtattcatagccattcatataatgaaaagaagttttcatgggattgtaataacatatcaagatggatgtaattaaaacagaagcagattgacaccctgaattaaatgtaaaccataaaccaggatacctgagcattgtgccttacatatttgctgtagggggcagtcagccaaatatgcaaataaaaagacattgatgaatcttcctgggtgtgtatgtggttgcagagaacccaactattttattaatcttttatcaagcattgtttagatttgcagcagccatggaatgtattaatttggcagaccaaatagcttaggaccagaaagtaggaaataataaagggaagacatgattgatacgctgtcctataaataacacatgcgactgacaaaggggctgagtaatctttagatctgtgcttcatttcattaatggagttgttaaaccaggatgtttgagttgaacttcaatcagagaggctctgcctcccatttaaaatgcaggcctacctctactcactctctggactgatatgttgacaaaattggtgtaaatcgaatttttgtaaattggatcaaatgcactaggggaatcttgctgtgaaaaatatgagtcctttttatcaactatagtactcctcctctctgcagggaggctgggattttggtggagtgagtctcttcagatgggcattgcttcctctgagacagtttcctgcacgtgttcccggtgctctgttccccgtgctcctggaagacagtgactgtgagatttgcattttttcttcaggttttatacctcacttggtcggtgcttccaggaataattggtggtgatttgaataagcccgcatcattcagatttcagagcttggttttcaagtgcttgctaaggagggctcccagctatgaatatggaatatgatttccatatctgttccattggggagtccaggcgtgtcataaccacttcagagtcatgattgtatcgagacaccctagctgtaatttttctatatgacagttcagttttaaaattgtaaagatgccaaaagcagggctgcattgttattagggaagtcagtgacatctgttatatcttgttaaccaggggaggaaaatgctttaatcaaaacatctaattataccctatgaactgatgaaatatcctttgctaaatttttggaattggccttaatggaagaagctggcctctatcagaactgtgaagtaaatttaccctttttatttggaaaaatatttattcctaaccatagtgacataagggtattttaattgtatcagattacttttatatgtctgttgaaaatagttatttttcagaagttgttcaagccagcatcacgtttttgtttttgtgctctctgactcccttagcatatgaggcccccagagggagtttgtatttccagatgtgagcctaggaggatatgtggtgtcttagagccacctggggagggagcaaatgataattgcaggtgagatgcagggggataattcagcctgtgtgctgggaggtgcgatttcacacctgaatgttgagacctgctgtgttagacacttgtgttgttttaaaatgttttattactctaatatagaaatggaccagattgttccaggtcaccttcagttgaaagaatataaatgtttttaaatattgaagtataatgtgattccagaaatggttcctgtgtttaaaagtagttttacatatatctgaaagcattaaaatctgtttaactcagcatgtctatactgcctctacctctgttgatcattttttaaaaattgtaggccgggcgcggtggctcacgcctgtaatcccagcactttgggaggccgaggcgggtggatcacgaggtcaggagatcgagaccatcctggctaacaaggtgaaaccccgtctctactaaaaatacaaaaaattagccgggcgcggtggcaggcgcctgtagtcccagctactcgggaggctgaggcaggagaatggcgtgaacccgggaagcggagcttgcagtgagccgagattgcgccactgcagtccgcagtccggcctgggcgacagagcgagactccgtctcaaaaaaaaaaaaaaaaaaaaattgtaaattattttggcaatgtggctttccactttgaatcattcaagcttcaaactgtccagtaaaactatccttttatctatatttcaaaactagaattaattttaactatagctgttagttgtttccagaatcactgacgatgattataatattaatgatagtacattattgatagtcttaatgctgggatatggattatttctgagaaatgattaggtctgagaaatgctttatttcttagttttgggggtatttcatctttctgacatggttttcccatgtatggagatcttggggcccacctgaaggagttttttgaagtgttgactgtgacactatgggcttcatgtttactttgggatctggtgggaagttcaagtgctattaatttttccttggtctgttttatgctttgtaatggctttctgtgtgttttttgggagttaagactagaaccttggaaaagagagagccagagttttctccctatatttctattttaaaacttttttttttttagacatgttctcgctctgttgcccaggctggagtacagtggcgcagtcatggctcactgcagcctcgacctcctgggctgaagtgatcttctcacctcagcctcctgagtagctgggaccacaggcgcgtctcaccacgcctggctaatttattatttgtagagacggagtcttcctatgttgcttaggctggtcttgacctcctgggcttaagcgatcctcccatcttggcctctcaaaagtgctgggattataggcatgagccactgcgcagcattttatttcttatgtattgttattctctctgtattctctgcctaaatgtaacccctgcactctttctgtatatatccttctggggatatttgaggctttcagaactgtttctttcttcactcagtaatctatgcatagtaggtactcagtcattgcttatttacagttgacaacaattccatgaaaagaaatttttgaagagggagctgctatttactattcgccttgtgccaggcattgtgctagcaattttgcattcgttatcccattgacgcaccccatgaaaaaaagaataataatctctgtttgatagttgaagaaactgaagcacagagccgttaaatcaacttggccaggatcagtataagagaggcaagaaatgtagcagtttttgcctgacttgaaagcttgggctccttatccctttactcattttcatacagatgcattttgtgaaagatggccacatggtctctagtagaccacatttgttcattgttgtgctgaaaattgttacaaaggattttctaggtataataataggatttagggaggggagagtacttattgtccaggtctttatttcctttgaaaagttggagcttacagttaggttgctgccactcatacaatatatctgtaacatattcgttgttgttttttctctgtttcactgtttctccctgttataaaatctgaccttttcccgggttatactactcaggtagattttaaaccattgtcaaaggcaaggattcaggctgatgatatagagggttattgtatgtcagtgtctgttctaaacccttgcactcatttatctcactgaattctaaaagtagctctctggaacacaaatgtaaaattggaatgaggactagcatgccctcacagattactgtgcatataagcttatattctgctatagattctgaagtattttgtcttgtctgcttttaaactgttctaggaagcagcacttgtcttgagaatctatttcacaataaaagagaccttgttttgagggctaggtgtatttttttaaaatctattaggaactctattctttctggtaaaagaccacactaaatagctctttttgcttttcttgatatctgtatcttgaagataccaggtgacaaatagtccattgatttcctctgtcattgtttcctttcattattctaagcagatttgcaaattgttctctcccatttcccattccaccctgttaaggtttgtttatgctacaaagagtatgctaatgaatataactgttagatttacttcttaaggaaatcccaactgcatttagagtactgtacatttttgagaaggctcctcctcatttcccctcggctaagatgggcctcctcacaggtcattctctgggacttcacgattcagaactggtccattaccattcatttacaaggaatgggggttagtataaagatacacacacagaataccctcactgggcctgaattttctaaagatttctagatgaatatgaagatcagtcaagttacacacttctctcaagagtcactctccgtctctttctttctttctttctttctttctttctttctttctttctttctttctttttttaagagatgggatctcactctgtttcccaggctggagtgcagcagtaatcatagctcactgcatcctgaaactcctggcctcaagcgatcctcctgctgcagcctcctgaggacctgttggtgtgtgtcaccatgcctggctaattttttaatttttttttgtagagacagggtcttgctgtgttgcccaggcattctcaaactcctgggctcaagtgatcctcctgcctcagcctcccaggtagctgggactgcaggtgtgaaccactacccctgctaattttttttggaggggtagaaatggggtcttgcaatgttacccaggctgatctagaactcctggtctcaagtgcttctcctgccttcacctcccagaatgctgggattacaggtgtgagccactgcgcccatctgagtgtccgtatgaagagaggtggcagtttcttcttggaatcaccatgctctgagacacacagtcttgcctttctctctccaactgtctcaataaacacaattgcccctttgtatgtcccgaatggaaataccatactagaattctattttacagattgtaattgttggggagacccaagtcaaaacatgttctttgaaatttaaatataactgtaaaaggaaccacaaagtctagggctttaaaggtgatcttttatgctttgattttatgtatttgtaaaatacaagttctatattgactctagggcctgtctcagattgtaaacccttagatagtaactgtgtctttttaactgttccttgtatccttccttgcccctctggtggtctataatacccctgttgtgatgattttgattaaagaaacatagtgtgaagatgggctgtcagggatgggtgtcagtttcacttcagggtagtgggtgccatctattttctgattacaggtgaacattactttagcattatttttttttgagacagagtcttgctctatcgcccaggctggagtgcagtggcatgatcttggcctactgcaacctctgccttctgggtttaagcgattctcctgcctcagcctcccgagtagctgggattacaggtgcccaccaccacacctggctaatttttgtatttttagtagagacaggatttctccatgttggccaggttggtctcgaactcctgacctcaggtgatctgcctgcctcagcctcccaaagtgctgggattataggtgtgagccactgcatccggcctattttagcattcttgttgtagatttctacatctgctgcccatatttcagctgtactcttattttgtttagtatggtgtacctgggattagggacagacaaatatgtatgctcagcctgatttggaaattacattgttgaaatacagcccatatggccattgtaaaatggttagtgctgcatataattgcctttccaatgatgtgctttgtcattacttccatcttccaagaagcactcctgtagcatgctgacagcaatagcatcattagaaaacatatggacatgcaaaggcattaaatcgtctttagtttaaggattagattacagtgttagaggataggtcaccaggcttgcaatcgatgactcttgcttagttcagcactgctagactggatgatagagatttgcaaaagtcctatttacttgtctgctgagtgtatttcatatcttccctgcaattgtgagaaggtcctttagctgtgtataagcctctatcacagtattgcagccagttggcttctcaggagtgtttttttcaactattcatgtcctgtgcagaattcttttctaggatgctccctcaacctctgtttttctgaatgtgagcccaaagcaggctaagccaggaattattttatttgggggtcatttagatataaaaagagactaagtggtggagtcaagaaagtaccaggtggctgccatgttgcccaaatatttcctcccttgtacagcatctatctccacatgggtctcaagtccacctcccttcttcctttcccctcttagaagcaatgggattattgcagcctagaggctcagtggtaggtcctagaggccgagggaccatgtgatagagcctggaaagagaccaccccctgaatcctgccctttgtagttggatgttttttccccccacaactagataggtttactatctggctgtaaatattctagggatgcaacagttgtgggacatggtatgatttgaattttcagggtcctttttgtagttgccagtgaatagtaagtgaaatcgcagaatggaacatcattcatcaaatttaatatttcttctttggagtttaacagaaataatgtggatttggggactttcagagtgataagggactttggagatcctcatgggcagtggttttgggtacctcagggtacgctgagtcatttgaggggagatcctgactttattaaatcagaactccacctttacctgtcttctatatttatacttatgtattaggattacattctctttgagaagaaaaaagtgtctggatttgtttattctttcattcaaaaaaaatttattgacagcttctgtgtgctaggcaggcagtactccaggcacaggaagtaccatagtaaattagaaaaaatagatatctattttaatggagtttatattctaacaaaggatggggggacatactgtaaataaacaaatatataatatgttgggaggtgacaggggattttataaagcagggtaaagcaagagtgagaacttagcacagcaggtcctcaaataacattgattcttttcattataatgttgatgagaaaaaaaattgattcctggccagggcaactgtgtggagtttgcaccatctcctcatgtatggtaaaattgctttcattatgcatcgtgtcacgtatttaactgaggactcacttgtatgtgtatgcttacgtgatgctttatccagggtgggttagataaggctcctctgaggaggtgatatttgagcagaaacttgaaggaagcgagggagcaagaaatacagataacccggaggagagctttcaaggaaaggggagaacaagtgtaaaggctttgaggaagaaggagtggcatggtatgtgagcaacacaggagatgttggcggctggaacaaagccattgaggaggggacagagagtggggaggggcctgcagtcactttaactgagtgacgccagaagcttagaaacagcagaaagcaactgtccaaagccctcatttcccaactgaaagtgtttttgaatttccccaaggtcacccagctgatgtataaacaagagcacatctggagctcacgttatattcttttaaagtagcttctcattgtaccttgtgccaccactccaggtcttaggagacatggggcatctttttggagacaagatttgtgtctcctttcctgttagtgggtatggctcctccaagagatgtgcttcaagactctacagaattccagtgcccagtcatcacaaagtgggaaacggctttgccagtgccagaatcaccaccatttggggaattattttaaccacaatggctcatgtttatcacaggcttactgcttgtgatgtttgttgtacccagagctttacatgcattaacacatctaaccctcacaacaactctgtataataggtcacattatcattattttagagatgaggaaattgaggtgcagagaagttaagtaatttctgtatggtcatgcagatagagttgtagagttgggatttgaatttagactatttgcttcagggcctgcactgagcctctgacaaagaggagggggatgagcttgtctctagataaactaattggaatatgctcccctcgcctccattttaagatggttctaggtagggcctagccttgggagtaataccaacttgtcacaacccacttctgtgactccaggtgttagtttgtgtagaggatttcacagccagtctggctcagtactggcaactttgctgattttaggtggattcctgattcagcaggtacctttggtctttctgagctgagtttgactggagcgtttttcaagacctgcatgagagtgtgttacggaatacaggccagtgttttcaagtcagcggacccagttttagctggtctgtcttttttagccccagtgaagtaaaagccccagacaccaccagtgcccataatccataggaatgtaaaatcatctttttagtactggtgcttttgaggaccagtacactatgtgcttgctttaaatttgtctaaaaatgtatgcatatgtagatatgtgtatatatgactatgaaatattttctaggtatggaaaagtataaagcataacatagccaacacccatgtacccaccaccaactttaaaaaaccttatgactttactgtaattttcttaaaattgtaggttatttttagtgagcaggaaccacagtcaaccgtaagttttagagtccaggaggctcaaacctggccacacattagaataccctggggataccctggggagctttaaaaaagtccttgtacctctgggagggtgcaggaagcccccacctctatcatcagaattttaaaaagctccccaaggcgaggattctatcatgcagtcagggtaagagacctgctgtttggagggttgtgtttggtttttcttcactgggttctcagatgcctggtaccaagccatgtgtggtactcctggactttatatttcattttcttaaagcattttttaatgtggttctactttcaagattctggagggtaatgtcctggggagttcctctccttagactcttccctcttcagcaccttatgaggcaagctgcggatatatttacatattcattacaaagcataagcatcaggaacttagagagtaggagtgaggcattagagaggggactaagaaattcagaagtattgggagctactgtctgttgaaagtgtttgagatgagtgaaagttatagcattaccttggaagtcagggggatgcagggttacatttagaaaacctggagtcacacataccttcacaggaaggctctgagctgtgggatggtagttgagggcctttttggtctacatcacaggtttatcagtgaaatatgtggtaagatgtacaaataagatgtgccccaccaccagaatgatcagttctgtgtggacacgtccgtgactgtaccctctttcagaagtgctatcaattatgtgttatgtgtggcctgattatcctctgtgggccttggctccatgcagcacctccatccccgtctgcccactcattcattcaacaaatagttgctgagtttctcttctctatgccaggttctgttctaggcacttgggataaaaacagtgaactaaacaaagcttctgccctcaaggaatgacattctggggatgtgggggagaggtgggtgagtgggtggtgttacattctggtgtcgcattgttttttgatgtgtctaacacagaaaaagatgtgtaactgtaatcctcctttagaaagctctaggggagccatttggcaggtagggaagtgttttgcctaatttggcttaaattatgattttttgattctgaggattttgattacaaatgccttcatgaatctacttcttcaagagaaattaagtgctgagacattaaagcttccagggaccttttgaattggttggattttattagcagcttaaaatgagcatgacatacagtaaggttcaagcttaggggagatgctgaagaaataaggatacttgattttctttccacttgaagtggaatccactaatccatctgtgctcataaatttgagagaaggagggcggaaaacgaaagtttatttctagggctctctactgggcaaggctatcaggttaccttcattgaaaagacttaatcagaagtgaaacttaaatctgttacagtcttccacagctgtccagggaattgggcactgatgaataccgtcagatggacccctgaatagagggaatgccttagaggtcatgtttggagttagtcaataaaatggatctcgagaagaaaatagaaagtttgagggaaaaaaattactggaaaagaaatcttaaagcttttgggttagatgttagatggatgacgaaaacagtgggtgatatgatttcctttctggattaccatcttcatcagatattgttgtcgactacagaaaaaatattcccagcacgtaaggactctttatacctgtgagctcttaaaaagaatcatctaaaatactaaaaaagcaagaatatgttgtttcactagcttttgattcctaaagtagattttgacttccgggtgtgggaaggtgggtggaaaatgagtttttgttaatattcaaaggcatgaaaacatttttaccagtttatgttttcctggtgcatttagaaatctgtggatccttggggatggtgtatgcaggcaaatagagaatccagtacttgtgaatctgcctgaatccacaggtttgggaataagggcagggacttgagggttcacagatgtgaaggttgtacacagaactcatgcagagagatacaagatctttttgttccccctttgattagaaagaataggacatgaaagtacttaattgtcaacttcgtcttcaccataagcccagtattgatgcaaaaatgataataataatgagaacaagcatttattgagtattgggtattctaattgcttaaatcaactcatgtaattctcacagagtggttctatgaggttggtgccgttttgattcctgttttaaaggagaggaaacaggcacatagagtttacacccaaggacgagtgtgtcagtggtggagcctatacattctggctccagaacccgacttgaaccactacataagggaactaaataaatgcttcttaagagttttattctgatgttgcttttactgggactttcactcttttttctacccaacccaccccacccctaccccactcgcctccactttatctttggatgtcttcagaatctataatatatcttaagcttgcaccttattacagatgagaaaatagagagctataaaattatgttatataattgttctgtatgacctagtgaatctttggtagaacagggatgtggaacccaggttttctaatatttaggtcactgctttttctcactgcactgtatggcttccattaaaaatattttaaactaactgaactaaaaatttataaacttaatttgtgtcactcatacttctgtggatgaactacattaaaataactaggtgctgtgagattttgctctagggaggagggtggtagacattttaggagctaacatttgcctctggggttatttgacctcctcctgaggatgtctttctaatctttggtaggcgtacttaaaagtgaggagaaagtatttgaggaaatacaagagccattcgcagactttagtatgatctgtgggtttatggaagggcttttttttttctttctttcttcatttaggccttttttactttaacctccagtggggacacaactaacttaaatcttaaaaacaaataaacaaacaaaaaccctaaatacaagccttctttcgctattgtttggcaaataagatttcacaagagggtagaaagaactgccttgattcttggtgttttagactttcctatagtctagttttttgtttttgtttgttttttcttttggtcctgtgattccttttgttgttacctgtttccttggctaatgctttgtttaaaaacaagtgctctggtattccaaaacaaatttccagcaggcttcccgattgtgttctcagataaaagaccccagggtagtgctttaacttgaattttggttgcctatgcatgcctgagagcaaaattcagtttactaggtggcttccaacccagattaatatggttatatctaaaacgagggaatatacatttgaaacaggaaatgtggattggatttaccctttcaaagagccctaatgtgaatgtaatgagtagagttttgtctggggttagatactgtgggctccagtttgtttttgagtttttagctgaatgaatgactttagtcctgtcattaaacctctggaaatttaaactttcaacaatgtaataatgataatgaaaatagggaaaggctcctagactgtgctgtggaaaaacacatgttcagattttactgaagacccagaatcccatgtggccacagataatttgatttcacagtttctatttctagatatacaggatggggttgccagcagaagttacatagtgataataacatatcagcttcctttttagggaagatattgtaattgtgagaaaaatattcagaaaagccttggccaaatattgtttgtagttggtaagagaatactcagttattaaagcttctgcgaaccttttccaaataattacactttttccctaaaggaatcctcccacctcagcctcctaagtagttgggaccacaggtgctcattaccacacctggatgggtggatggatggagatatatatatatttgtagagacggagtctccttatgttgcctaggctgtgttacattttttgtcacacatgttgggtatggagaatttggagtaggtagtttcagatttgcacatcacaagttcttgccttgtgcagtggtttctaaaccgagttgcatatctatactccatggtaacttggtaaacatactgattcctggaccctgtgtctgatctactaaacattaatccctgctctgtggctctggaacattagtgttttgttttctttttggggtttgtgacagggggacaaggtctcgttctgtcacccaggctggaatgtagtgggacagtcatgactcactgcagtctcaaactcctgggctcaagcagttctcctgccttagcctcccaaaaagctgggactaccaccaccacgcccagcaatttttttttttttttttttttttttgcaggggtagagacagggtttcaccatgttgcccaggctggtcttgaactcctgggctcaaggaatctagctgcctgggcctctcacagtgctgggattatgggtgtgagacactgtgcctggcctggaacattagggttttttgtttgtttgtttgtttgtttttaacatcaagttccagtatagaagtttcagaaacactatttcttaaaatatttttgagtgttttcctggggcagtggtaatggtgatggtttacaataatttatttctatgctatgtaacttttctgaaaagaaaacattcctgtgtatttggttttaaaaccttatttactgtaaaatagaacacatcctggaaaaagtgtagtgtacagctcaatgaatgatccaatgaatgatcacaaagtgaatacccaggtaaccagtactcaggtaaagaaatagaacattgccccctccccacaaaaaatgatttttattagattcctcaaattttcttttctattcctcctcaaatcccaagaaattagagatataagtaaaggttgatgaaacaatataataaggtgtaagtgaaaaaagcattgtcttttggtaggtggtgtttcttaattactcttttcagtaagtttttggtgatgttaagtttgtgttgtttatctatgttttgattcagccttaagccagttcttgacagtgactgtctattaatgctcacagctgatattaagattacgttctaagatctatcttttctgcaatctgtttcactgaaaatattctcatgatagttttgaaaatgcgtaaggacagattatcttctgactctaataaacaagtgagtcttgtcattactgtccaggtaacttaggaaacctgtctcagtagccaggtatctttatctggtacatgataaaatgtggtttcttagttttttttaaaaaaagttccttcctcctctctatccacccagaataatctctcctccattccaacccaatcagaacatttaaagccctgatggtttttcttttttccactgaagaatcattcaattcttagtgagagaaggtctagctgtattaaatagcaagcttgcccattttctttggaaagggatgctcatggtaaaaggacctcaagcaaaccctgcacttaagctgtgtgcaagtggagggagagagctgtctgcagccacctgccagcagctacacatctgtgctctgctagcaagcatgtgggctctgtggatgtgagagctgctccctttcccctctctgcctcatgctcccccatcttagtgatcgccactatcaactaaacaggtgacaagactccaatcaccctgctctgaatggctctccatcttcccaaaagtataccagaggcctgttttgtttcagtacattgattaaataaatattcctgtgtgcacaaaggaactgaaatctgttatggcactctgcagttatctgtccattaatagtggagaaactactgccagttttctcccctcggtgcccccgccccccaccccctttcttgtcactaccacgcagattctcaaaggtgccagtaacagataaattatctgacctctgctttcaggcttgtgtgaagcgggaggagtggtgtcatgctctttggtgaggcatgccgttggggcagtgcccaagtgtatggataataggagagcccgaatgatttagattagaagatgctttcttgctttggggttgtgggacctttgtctctccccttcaattcttagcagaagcggactcagaaaggtctttcaaattagcttgcctctcttttataggaaaagggtgcttctggccctgaagtagttctgtgtgtctactgtcagatgtggaagccacaaagtgcctgtgaaacttggtcccttgcgtttatttacaagtttctttcaaatggcagtggcaggaaggatctttaccatttgggcagatagccctagtggttgatgggagggcttggtggaagggcaggctttgtgaaagatccaagtgtggaatggtaggaattctagccatggtggtgctgactggtttcctttcttttttggcggggcaggggctggggtggagtgttggttaaaagaacacctagataaaaaacatgacggatttcgaaagtgttatttgggctgcgcacggtggctcatacctgtaatcccaatactttgggaggctgaggctggaggatcccttgagtccaggggtttgagaccagcctgggaaaaacagtgagaccctgttctataaaaaatttaaaaattagctggatgtggtggcttacaatggtagtcctgtctactcgggaggctgaggcagtaggatcacctgagcccaggagattgaagctgcagtaagctgggattgcccactgtactccaacccgggtgccagagtggggctctgtctcaaagaagaaaagaaaagaaaaagacagggaagggaaagggaaggagaagaaagaatgacaatggaacataggaaattagggttgtagagaagactctatgaacattattgtggtgtgaaggaatggcatgcagagataagtgtgatggaagggaggtgttgaaatgtttacagctcctaacatctaccaccaaggagggggcacccctttgacagaaacgagagggtgttcctgagtagttgtgacattaaaaaaaattgcagggaaccttgtagctgcatggatggcagagacacataagtagggaaaaatgttggaataggtaaagtgaaatctcttagtgtgtgtgtcttccaactgactgtgggtaattagttggaaatgacattaacctgagcttaattgtaattttgcatagtaacaacataccagctgttcactgtattctttcctggaggtgcgatttaattattattatttttttttgctatcttttaagctccaattttctgttatgttttacttaaaccccgcctggttgccgtgtccacagtccccacagtttagcagtaatgtcatttttgttgctttcatgcccactgtgtgctgagggcttgggatgctcttgattttgctaatgacttggatttataaagggccacattggaaggtcactgagaagcatgggtgattggaaaccttgtgttttgggctcttccacaaggttttagtttattatataaatcatatgcataattctaggcctatcagaggtgctcaaagtatcaagtgaacaagctgaaagagaagttaattactgaacagtgattgttctgatataaccaattattggatcattaaatgtttattaccttttatatgctcctttcccccataagggcagtttcttttttaagtcattaaaacagaaatgggatcttaaaaaaattctgcttaaaaaatttccacgagactgaagtattaaaaaggtcttgtgtgatctgacagctaaatagcctgtttttctttggtctgttgaattagtaattaatgaaatgtattgcctgagcagagaaaataagattagttttgtttaggaagaaaacaaaagcaaaacattaacccccaaatgcaggttaatattaaagtgcagtataagaaatagaaataaaacagtcttcttgaatgataagatgcctaatggtaacatttgtttcattcattcattcgtcactttcttgagcaccaacattatgtttagaaggaatgggtttatgtaaatacagaggaggcaaggtgccctgtccccaaagacacatgggttagcagagcagttaaaccagacactttaggcggccaggcacagtggctcacacctgtaatcccagcactttgggaggctaaggtgggcggatccctgaggttgggagttgaaaaccagcctggccaacatggagaaaccctgtctctattaaaaatacaaaattagccaggcgtggtggcacatgcttgtaatcccagctacttgggaggccgaggcaggagaaacacttgaacccaggaggcggaggttgcggtgaactgagatcacgccattgcactccaacctggacaacaagagtgaaacgccgtctcaaaaaaaccccaaaaaaacaaacaaaaaaaaacaataaaaaaactcagacactttagtagctactgttgcaatgtagaaagtggtaggataataggtacaggggcatttctttggggaggagtggttatgaagacaggttacttctggaggctgaggcatcctgtggattaagagtaggggagagcatggttatgaagatgaatcttgctttttgaggtcacggtgtcctgtggattgagtagaagccccattacttgggttcacagcccagctttgccactacctagctgtgtgaccatttatctcagtttccttgtgtataaaatggaataatagtaatgcaaccctcacaggtttgaggattaaatgagttattatatgtgaagtgcatataacagtttacagcacataatgaacattataatcttaggttgtggttatgtcatttttgtgggataatgtgatagaacttcttaggggagattgcatttgattgaatgatgaggagcggaaagatgtttcaggcatttcttgtattgtcccatgtagccacatacctaatttataatgcctgcagtaatgtgtcggtaatgtgtgcttatgtagtgccattgtcaaaagattacaaagggcatttacagacgtttattctaagaacagtcccctgaaacgagatggtttatgcatattcttctgaagtgtgagagggtgcagagcaagcccatcctgttcttccattgaggtgtgcttggagcctgtgtttgttgtgggtaatttagactcacagagagaggaaacttttaaatcttttaaattatatcttaaattcttaagttatatttgcaaacaaatgtggtaaatagattttaaaaatgttttctgtagcttctagcaatagtggaacttgtttattcctgaggtaccagatcataggcagttgaatttagaggaagtttataataatgaacatttgtcgtaactgtgaggttgccactctgtattagttttcacactgctaaaaagaaattcctgaaactgggtaattttataaagaaaagaggtttaattggctcatcattccacaggctgtacaggaagcatggctggggaggcctcaggaaacttacatggtgaaagttgaaggggaagcaggcgtgtcttcatatggctagagcaggagaaagggagagggggagatgccacacttttaaacaagcagatctcatgagaactctttcacgagaacagcagcaaatggagaaatctgtcccccaggatccagtcacctcctaccaggccccacttccaacattaggggttacaattcaacatgagatttgggagggatacagacccaaactatatcttattatcctcattttacagtgaggaaaccgaggcactgagatgttcaggagtgttgctgaaatcaaaaagaagtgttgacccaggatctaaggtctttattgcatttgcgtaaaccatttcatttgatttgtgtgttttacaataaccctttgagaaaggtcagtcagctgctacgtgcattttgggaagtatcgtttatgagaagttggtggggcatcacagtgagcttagcatggactgaaaattttggggtggctgttgtatacccttttgctacttcaagcaagacacttttgggcctcaagatctataaaataacagagtttggaggaaacattgagtctgtaaactatgaaattcttgtgtagcttggagtgagacccatgtgggaatctttggcagccaccgtttaccaccttaacttttctgagcatgttttattattggtaatatggagctgtggtactccctttcttcagggctgttttgaacataatgcttataaaatacctgacagaccttgctagctctcagccaacggaggtgggattcttgttaattgtttcaaactaggggtcatacaggtagctgagcctgggtgagaagtccagcttcttaactcctctggggctggttctcttcagcacccaagccatattgctggggataaggaagacattttaatgagatgagccccaacttctcattagaagctgcagtcctgattctttctctagatcctatcaggttgccagttgatccagtaagtaatgtagtaaatgtaatggatccagtaaagagtttggggttttcatggagtaatttcctaaaatcaccgcagtcagtagcctgtgagccacatgagggcaggggacttgctctctgtggtgttcaccttgtataatgcaaggtgatgggacagctggcacatagttcggagtctggcagtatttattttgtgaaggaaggaaggaatgaacaacctcagtgagctgtagaaaatggtatgagaaagggaacaggatttttaaaatttcagttttgtgggacagaggaaattgaggcactgaatcaggcaggttatgcccagtctctgtggtcaccaggccttaaaattgggcataatttatacccttgaagatgttgcatggcaataccttctggtgggtggatcacctgaggtcaggagttcgagaccagcctggccaacatggaggggaaaccctgtctctactaaaatacaaaaattagccaggcgtagtggtgcacacctataatcccatctactctggaggctgagacaggagaatggcttgaactctggaggcggaggttgcagtgagccgagatcgtgccacttcactccagcctaggtgacagagcaagactctgtctcaaaacaaaaaccaaaaaacatatttctattgtgaaacaaaattttatccatgtcaggaatttcctctgaactagagtatgttcattcctcttttgtgatttgagtctgtgggagtcggaacttgtcaggaagacttagtgtagctgtgcttctaaggatgtgctattctcacaggcagccgtgctaaccatcttgctgtaaactagccacgagtaaacgtctggttgtgaatcacagcgtgacctttcagggaaaacaaaacaagcaaaccaccaaacacatgaatcagattttctttagtatcaggattgtaaagtctggtatttaacagtttgtcaggcccacttggagcagttgagacaacttcctttctctgtttttgtttgttcaagatgtggaagtgtatatccttctttagcaacatattaggataaaaactttaaagttttcttccactgagttaaactatattagttttcctaactgtcatggactttaaacaattaaagattcctggttaccactcaagacctactgaatcagtctcttggagtgggacccagaaatctattctgaagagcaccctaagtgattctatggttaatcagatttggaagccactgagatacagaatgataatattgtattttctatccacccatttattcttttttttttccttctctgtggtccgaatatccatttgttcttactcatttatccacgtcttgagtagattagaattgattacctatagggcattggtcattttaagaactaggcgtagaaacaagaggtagaacacaatgcctgccccatggggttcacaggtggtctcagaagtttttaactttgggttgagtgttaaaggattcacatacttcccaaaagccaggagcagaagattttgtgtacacacttttttttttttgttttaagctttcatcagattctccaaggggtcagtgacccataaaaggttaagaaccaaggtcttgtgcttgcacagctgttctggaaaaagtagaagagggcagtgtttctgttgccacttaagatgtttttgaccttttgagaggcaacagcggtttgaggactgtacctgttttctgtcctacttaaaatatttaaaaagaagaaaaaatagtttaacatctgggtcagggtcagaacaagaccaagggatatggaaaatagttatttcgtgaactgcatcacatttaatgttaaagagctgctgacagccaaacagcctggtggttagcgtgatggaggaacttcttaagctggatagcataggcaaggttcattccagttttcttacagtatataattagccaaattatggataacaattttcaccccatggatatacataaagactaattgtcttatttttgttccattttagccccagcatgtccattgaattgcttaattccaaaataactttgccagccgtacagctgatacattcttctttatcttctaaaatccccaaataacactgttcatagcaaaacagagttggatattaagaaagaacatctttaactgctgtggaaagtgtttactttgtaaaacactagaaccttgtatgtataatgttcttatccctaaggataactttataattgaatttcaattaaggatgttctcttccttttcctcctcctcttctctctaagttgtactcattgaattcatgtttcaatggggaacaaaaatttttcaaatattgttgttctggtaatgctgcattttaggatctggagagggcagtcagtgggattaaatgttatcaaataggttaaattatttggccatttactttggtatagttcctctggagctcaggaggatgttagaggtctttgttgtcagtgaaatcttgtaaatgtatttttaggctgttcaaatgtctggatcacctattttgaacttttgcatataccaccttacattacttatttttataaagtggacattttatctttataaggttttgccttgctggacagtgattatgtgttctaggtctttatagctttgccattacccggcatactgagcacataacagacactcaataaatatttgattaattggatatgttgattgggtacccaagaaaccagaagatgaaataagtctggagttagaacttgatacatgcttagaaaggtaggaacgtaaaagtggattatgaggtctatctcttaggctgacgtgctctcctttctccttccccatccctctccaccccctctcctcccttctctcttccatcctgcctctcctctccctccccctctcccctctcccctctcccctctgccttctcccctctcccctcttccctctctgttttctttctctttcctttccctttctctttccttaattttcttttctttctgttcatatataggtagtagagccagctcacgtttgctagttctttaaaaatcttaagtatttagaattccacagttacaagaattttatggtagagccacaacactaagttttcatttggaaaatgttaaatgtagtgaaccttgagagaggtttttattagttattgcttttatttatttttaaaataagtttcattgtgtatttgtaagatatataagattataggatgcatagagatagtaaaaaggttactatatatagtgaagcaaattaacatattcatcaccttacataggcaagagcagctaaaatctactcatttagcattaatcccaaatacagtacaattttattacctttagtcctcatgttgtacattaaatctctagacctgttcatcctacatctcctccatttccttcctacccctagtaaccactgttttgttctctgtctctgaatatttgaaaaaaatttttaagattccatatataagtgagatcatgcaatatttttttttctgtgtctggtttatttcacttagtacagtgtccttcaggctcatccacatttgtggcaaatggtaagattgagtttttttaagggctcaataatattcatacacacacacacccacccacacacacacaccccccacagtttatccatttgcctgtcgacagatgcttaggttgtctccatatcttatgaataatccttcagtgaacatgggagtgcagatatctttataagggggagatttcatttcttttgggtaaatgcccagaagagagattgctgggtcatatggaagttctatttttaatttctttagaaacctccatactatttttcacaatggctgtatcaaactacattcccaccaaccgtatacaagagttccttttctccactctttccaacatttgttatctttttactttttgatgtaagagctgtcctaatgggtgtgtagtggtatctcatgaaatggcattgatttgcatttccctgatgagtaatgatgttgagcaccttttcatatgtctattggcagttttatgttttctttggaaaaatgtctattcaggtcttttacccatttcaaaatcagattatttgtttttctactattgagttttgtgagttctttatacactttgcatattaactccttatcagatctagtttgcaaatattgtcttccaatttgtaggctgccatttcattggttatttcttttgctgtgcagaagccttttagtttgctgcagccccatatgtttagttttgcttttgtggtctgagcttttgttatgttatccaaaaaaatcattgccaagacaaagtccaggagtttttcccctgtattctcttctaggagttttattgtttctcgttagttagtgcttttaagaaggaaggaggcctcaccagacttgattattattttttttttttgagacggagtctcgctctgtggcccaggtgggagtgcagtggcgcaatctcggctcactgcaagctccgcctcccgggttcacgccattctcctgcctcagcctcccgagtagctgggactacaggcgcccgccatcacgcccggctaatttttttgtatttttagtagagacagggtttcaccgtgttagccaggatggtctcgatctcctgacctcgtgatccgcccgcctcggcctcccaaagtgctgggattacaagcgtgagccaccgcgcccggcccagacttgattattaaaagacatctgctactcaaatagatgccacccttaatctgtcctaatcaagtaaaatcttgttagttatatttgggtagaggaaatattgtaggctaatgaacagtggctgtcaacagttatcttgaaaatctagacttgtagccttgaaggagagggacccgaactgtgaagagatttgtcactaaccatgctatattggatgtaaacctgggagtggttacaggaggtggcttagggtaatatgtgctggcatctttaagtatttcgggaagagggatttagatccaagtggtcactcctactcccattggagacgcaatttggcattgtgtataaaagaagagtttttctaatagtgctgtgttagggtcctgaattccagctgctgccattcaaacaggctcacttaacactcacctggattattctaatgggaattcaaactgggtattggtgacctttgagggctctccctcccaaagagactatgagtgtgtgatttttcagggcaaaatgttctaagtaaatcaagtcatggttcaaagtctagatccgctccttgtaattttttttttttctttttaaagaactcagtcttgggtgctgtttacttcatatttaagcccatggtccccatgtgtattgaactggcacaaactaaacttgtctgctcctctaggtctcttctcatagtctgagttcttaaaattaaggtcagttaaaagaagcaccttggcattttccttattggagtttgctgtgtgtttgcaaatcaaaatgggaattgattcagtcatttgggctatacaggttttcatctcaagtcacttaagtgaaatccataaggaaagatgttcatgctttacctaccatagggctcactcacctcttttcttaaatacaaaacaaaaagcacctgccagttttaagggactgaaaaggtgttttatgatggctgaaaatacatctgagaataataatatagttatacctagactggtgatacatcattacagtatctgcggggaaaagtagagggtggaagtctgtatgtggggtcagtcttaacaaggaaagctgacatgaatgctctagccctgcagtaccagagggcacctggattaatgttctgggccctaattcagcgtcctgtctctcagacacttggcactgatttgctcatctcagagctgaagtcttaaggactaagaggagagaggaacacatcattttctctgccagaggaggtacttaaactgggaaaggaggaggagaccttaacaaatcaagccttggcaaggaaatctgtcatgaatcagcaatgccttggaaagcctctttcgctgtattttacaaagctaaacacttgtcgctactgacatttctctattgcttaccttgaggatcagctttaggtagcactatgaatggaatgaatccttttttgtgtgtgcccattttgacattaggtaattaatttacaactagctcaattagagtccagcccatacagtgtgtacatggccttttaaagagcctttgttttgacgctaattgaactggttgtagcagagacagccaaacaatttgcattcatctttggcagaacacaagggctctcccttggtatggacagccccattttttattccttctaccaagtctggcactaaagtgatgtgtgcttattttatttttctaatttaaaaaaactttgaagaggacaaaagccacataggtttattgtagaaaaattggaagacatagataagcaaggaagaaaataaagatcatacattatcttttcttcttaagacggagtctcaatctgtcgcccaggctggagtgcagtagagcaatctcggcttactgccgcctccacctcctggattcaagcgattctcctgctgcagcctcctgagtacgtagctaggattacaggtgtgtgccaccacacgtggctaatttttgtattttttgtagagatggggtttcaacatgttggccaggctggtctcgaactcctgacctcaagtgatccgcgcccccccccccccttggcctcccaaagtgctaggattacaggtgtgagtccccacacctggcctggagcacacattagcttaataccaagagaaaaccatttacaacctagtatttttctttctataccttttctgtatatgagggaatgcatgcacctgtgtatgtaactgttttcatgtgttgtttttacaaaatgggaacacagcatacaaactgttttgtagtatgcttttttttcctacttaataagatggaagtgccttgtcattttataaaatgttgtcctacaacatttttttttgagacggagtctcgttctgtcgcccaggctggagtacagtggcgcgatctcggctcactccaagttccgcctcccaggttcacgccattctcctgcctcagcctcctgagtagctgggactacaggcgcctgccaccacgtccggctaattttttgtatttttagtagagacggggtttcaccgtgttagccaggatggtctcgatctcctgacctcgtgatccacctgcctcggcctcccaaagtgctgggattacaggtgtgagccaccgcgcccggcctgtcctataacattttaaatgtctgcataatagtcaattgtgtggatgtaccaaaacatatttaaccaatctgttattattggacacttgagccctttccaggttttcgatgttataactagccttgtgatatatattcatgctactaaatctttgtgaagtcttaattatttgcaaccaataaatttctagatattgaattacttggacaggggcatgcatgttttaacattttttatgcatactgccaaattgcaacaatttccactttcagtaatgacagctttatgtttattcttgatattcaggagtacagtatagagagtattgactcagaagtggattaaatcctgatcagtgattttgctattgcccctgaaatttacgtcagccttataatcttctgttcccagtatcaggtgaaagaggccagtttatatcatatagtacaatataggtttacttatcttgactaatatgtgttatttagttttgaaaaattgtagaataaaagcaggtagctgctgctgtaagacaaaagtgcctttgtttttcgtaaggcaggattctgaaacagtgttttcactatgaataaggaccaacctaaataaatagatgaaaatcaaagcgatagtagatggttttgctaagtatatgaaaaaaatatttggatcttcttgaggcagtgaaacccaagactggaggagcaagatgaactgtggcatcttgtatcaggggtggccttggagaggctgttatacctcgtgtatgtggtctatcattgactgaacatttgttatgctgctcatgattgtatttgcagcacctgaaagtgcagttggacaaatagatgctcattgttgactgaatgaataaatgaatagaatagatacacaggagagtgagatttcagaaaaagacctttcaggtcatctaagaccctccccctaattttattttactttattttttgagacaggttcttgctctgtcacccagactggaatccagtggtgcattcacaactcactgcagcttcgaactcttaggctgaaatgatcctcctgcttcagcctcccaagtagctgggactacaggtgcatgccaccgtgcctggctaattttatttttttgtagagacaaggtcttgctttgctgcccaggctggtctcaaactcctggcctcaatcagtcctcctgcctcagcctcccaagtgctgggactacaggcgtgagccactgtgcttagcccatccagttttctaattaaagacatagaagttcagaaagatgaagtgacatctttctcaagactaagttaatgatcacagcagaagttgtagttctctgtatcaatgtatttctgagattctcatagtactagaattgtatgtttttcccttgatatggtactttgtatgattaaatttcaaaatcaatagtaaaattttaatttcaaatgcagtataagcacaatttccctaactcctctttttttcctctgtttggaaatagcctcagtttttgttaaaattcaacacagtcttaaacttgcatttcttttttccttactttctttctttctataatattttcacctatcctatttcattcacagtggaggttttaatttacttcaagcagtattgccatctggatgtcaaaagacattgaattgacttcttatctgtagatcccaataaaggtctcacctgcctagaaacaaaagatttagtcaggaattgaggaggagcaaagcaaaggcttcaccagaggcccaggtgctacctatctgcccacttgttctttgattgacagtggggcacagaggtgccttgtgtttctctaggaagtagcttttgcatacagtgtttgtttggaacttttcaatttgctagtgctgaataatgtctgcagtaaaagttggtttagggtaaacccggagaaaggaattaaagagaagttttaacatttctattgtttttcttctgtgactttagcctttcccccttcttagtgaattattatagagttttattaaaatgtaagttctggaaattagacaccatggtatttagaccagcatgggatactgtactcttaggttccataatatttcatagtacatctctttattgtatgttaaatgatagcgaagtataataaaatgcacctagagagtacttatctattttatgtcctgtaacattcagtacttgatgcaaatgtagcagatctcgattcaaacaggagcaaaactggttataactcaagagaaaggggataggctcatcttgatggaaagttccctgttggtggcataagttcagcaaaaccatagaatttgaggctctaagggacctttgtaacatctactccaatcttttattttgcagatggggaaagaattagccactggttcagtgtcactcagcaggttaaagaaagacctgtgggcagaacctagaacttaacgcctgctctgctgtgtcttttcattttctgatcacaattgaagcatgtggtctaccctgtctttaaaagagcataccatttgatgtttgttagcttgaaacctgttgtgcccaagggcacctaaaggcttccgtcttgctcccttttcctggatgcccaggtcattctgtgcctctgagggtgggtttggatatggctgaaatgaaagctgtgttgtggcagtgcttagagaattgtctctgatgataggactcttttaagaaagcagtgaaaaagcagtaaggagactgttacttcataaaacaattggctctggacttggagaagacccaggtggcggatggttacatcccttggcagcagctgtctttgctatatctcttacagtcttagagatctgggagtctttggctcttaattttaacctagattcactgtatgatcttggtcaaacgcctcacctcttgggcctcagttaccttgtagtaaattcaaggggagttaaagtggatgatttctatggcaacttccaggccttgaattattatttttataaaagtttttccacatgatcaagtaaccaaacatgtattgctgacagtccattttattactgttttgattggttttcatgagaatttggaaaatgtctgcagactttactgtgatcaggctgctagcaattatttacagagcacccatcaagtgttcagggctataaaagaaatagtgtctagcttcagggagacagaaagacttcttgatctccccagccggggatggagggcattctcttccactggatttaagctctgtgagtgcaggggctttgtctctcttaagtagtgcacagttcagtaaacattggttgcattaatgaaagaatgaatccagttgtcagtcttgcttatatttactgaagatatcccactgagatttattggtttcttcaacccgtaaatgctgctaacttgaatacatttcccagaaagtattccttaccttccatagaaaaatgcggccaggatgctctgaggctatagggaaaaaccataaatattccactcctttcttgaaattcaatttaatattagcatattgaatgccctgagattacctgccttcaaatattttggtttaacccagcatttttgaaattcatttgacctcagaatattgttcattccactctcccatgacacacttgttaatatcccccagaactttgatttgtaaaataaaaaggttgatatagggagtaataatatggaataaatagaagcagcaacattagttaagaataattaattgaacacaatggagcatatacattaagtgctgttcctagcagctctgtgtgaaactgtggtagacttgtagattttttttcttttaaaaatgactatctatgtctcattacagatacaaggttgggtggtagagagattgaaggaagttgcaagtgacctaatagctaatttacagttacggaagttgaatggtagcattttaacttgtgtcaagggctgccctgtcaggtactgcaggggaataacgatgaaagggagtctgtgtctgctccttctggagctggctgtccagtggaggagacagacatgtaaacagattatagcaataaagtactcaaatgtgtaatgaacagaaataggacacaggaaggaatggtattttcccctggtttagaacagggttgctgttcatacaataagcccaaaccacattaactggaacccctctagatcctccagacaaaattctactcatacatcaagattcaaacaactcggcctcttcatgctttcgctgatccagaattaattgcatcatctatattgcctgcagagccttgcttacacctgtgtcataggccttatcataatctgctttgtatgtgaattacttgagggcaggatagagttgtctttgtccctgtatctctggggcctgcagttacagcatggactgcatattcgctgctttgtttagacttggagcaagttattggactgtgaaagctactcactttaagtaaattcagtaaataaaattatgttttatggaagacagattggacaggtggtggtattattagcattttctctcaatgcttaaatatgatttacatttcaagatttcagttacattttttaaggaattcaacaattctgcatcatgaagtattctttcacacaaatgttccatagtcattagtttttacagaacccttttcttatattctgcatttcatctggaatactataagcacaagttcagtttggcattctgttctccactagtgattgagtttgaagcccaaggtcaggatattgattgatgacatttccctttaaagtatttgtatccatttgcaatttggggacagagtgattcccagtatggtgcaggaaataactaaactggaagtcagcctgactcagttttgtagttaattttctttgtgaccttgggcaagtcacttaaccttccaataactgagggagttggcccagaactagcacagtcttctaatgcagacattccacgattctctagggaggattcacttccatagaggtttaaaagtggatacatttttaggttaaatggctttgttcatttagtttttttctccttaacccattttggagcaataagactgtcatggagtaaaaccaaattacctggaactctcaaaaggctgcagttcttatcctattttttttatttttaagggaagggaaaaaaatggcaacaaacaaatttatatccatgagtcaggacaaatccatcccagttttctaacatacacagtgtacataaacatattcaatgaagcactgcagattcttaaccgaaaatggaatatttggtttgacttaccatcctaaatgtgggaagaactgtactttgatatatactttttgagtatttttagcaaaaattgatataagcagttgtcttggttggcaaggacttgtgtataggaacctggctcccagctcagtgacgagtgtattctgtaactttgaataagtcactgaacctttctagatgtcagtgtcctcagctgttagatttgatactgttctgattactaacagatctgtgattagacatttccatgcatttatttcaggcctcttcctgttctcttccttgagagattaacaaatatacccaccccttccctcacacagtctcaggcaattattgatttgtgagggaaaaggggtattttaaaacactttaaatgatacattcaagaaaattatctcgtattggttatcaattgatatataacaacattaccacaaacttagtgccttaaaataatacacatttattatcccacagtttctgtgagtcaggaggagtctgggcacttcttagttgggtcctttgcaaggctgcaatcaagatgttgtcctgggctggggtctcacttacacgcttgactatggaagcataagctactgagcccactgtgattgttggtggaacttatttccttgcagctggaggactagagggacttaatgtttttgctggctaggggctgccctttgctccttgaggccacccacatatccttgtaatgtgtgcttccctaacatggctgctggccccctcagaagcagcaagggagagaacaaggcagtgctgcagtcttttggaatgtaatcacataatcatgtatacataatcatgtatgtccatcatctttgctctactctggttaaaagcaagtcacaggtccctcccacgctcaaggtgagatgatcacacaagggcattgacaaccaggaggcaagggtcatgggggccgtctgaagcatctgtcagccacaccatatttcaggttttttttttttctgtatcttcctttggatctgtgaataagtatctcacttcatactaaagcctcaataaacactgattgacagaaagtctttgtgctcatttaaaacttctcagctccacagagtatttgtaccatgcccttgttttatggagtccccagatactgatgagggcagggtttgagtttgagggctgttcattcttctgcccgccaaccccccaccccgcccccagcacagaactgccagtgttaggtgctcattaagtgtttgtcaaaggattataactgttgttccaattgcagcagtaagtaaatttgaagaagctccctgatattgagtgaattgtattctccaccccccaaattcgtatgttgaagctctaacctccaatgtgatggtagtcccagctaccagagaggctgaggtgagaagattgcttgaagccctggagatgaggctgcagtgagccttgattgtgccactgcactcaacctgggcaacagagtgagaccctgtctgtaaataaatatgtgtgtacagacatacataaggttcacaattcaatttaaaaaagagaaagtgaccatctacaagccaggaagagagcccccaccagaaccctatcatgctggcaccctgatcttggatttccagcctccagaactgtgagaaaatcaggttcgcctgtttaagtcacccagtctttggtatttcgttatggtggcctgagctaagacaggccctgtgttctctgtgtagcaagaggcaggaagctaagcacaaaggttgccagatagcagggactggctggctgttagtgagccagggccagtggcatttaattgcagtcattcccattctttgctgagctttggtcataactatttgtagaggacccctagactttttttttttcttccaggacaaaagtgatccaaaacatactgtcttcagtttttgagcattggactaccaaacaggaacatttaaggaaaacaaaatgttgctgttgtaaagccttgatggtgggaagttatgtagtgaattctcaatttcttcttcctgcatcttgtcttaaaaaaaaaaaaaaacttttaaagtttttgtttgttcatcattcattcattaataagtcaagatgtagagggctcagtagccttcccctagttttctacatttctgactttggtaaacttcctttacttctgcaatttccctaattgtaatattaacatatatctaaaaagaatacaatggttatgtaaacctcctagcacttaataggcactcaagacaatatgacttaactgtataagaatgactaatgtgctatgtttatttatttggcttcattcattttgccagcaatggtgtagtatatatgtagtatatattaaaaatctcttgagtaagagaggtttggaatgggaaaaggaaccaagaaaatctcaccatctttcttctgcttggcagcaagtcttgaattctgttttatttttcttaagagacggggtcttgctctgtgcccagactggagtgcagtggtgctattatagctcactgcagcctcaaactcctgggctcaagtgatcctcctgcctcagctacctgagtagcggagactactggcacctaccaccacacccagttaattttttttttttttttggtagagatgaggtcttgcagtgttgccctggctggtgtcaaacttctgacctcaagtgatcctcctgccttggcctccaaaaatactgagattacaggcatgagccactgtgcctggcagagtcttgaattcttcaacagggcttttgaatattttaaagccacataaaatttcctttttaaaattgcaatgaaaattgtcaagtaaagtgggtcattttttgacctggtgcttaattgtacttagaagcaaatgcatatctgtaagtaaggggaggactcagaagtgatttaaagggaggattgtaaaagagtttgggaagtccatccctttcattttacaggttaggaggctgagggcattgtgcaatgatgtatagtcaggtagagagaggaaacaggaatcataaatcttaccttttgtacaaagtcaatgttttcagtaattttgttgaaaacaaacattaaacaaatttggacctgtaaaatccattgaactggtggaggtcagcctgacctagcaggacatgtggcatctctgttttgtgatgctgtatctgctttgggagtcccagtgcccaatcccctcagtgttgaaaacttagctcctgagtttaaggtggtttctgtggggttatggggcagggggagagggtttggaggaggggaggagcggaaaaagagacttccagtctggggctcctgctgtgttaccttaggggatttagggcctataaaaaacacatttacatctctgaatggcaacagataaataccaacgagcgttaattgaaaaggaggagacccaatggactagaggtcaggactctacagtgatgactggtggcctgggggtgtcagctgaaacggtctggattttttttttttttttttctccttcttcccctacctccttcctgggcttagaaatgctggaaggaagaaggagggaccattagttgaactaagaggtatgttgtttatactgttgttgtggttgtccctgggtggtctgaaattttggaggagggggtagggaaaggccccctaaaccttttttaaactagtataatacaacctgactgctacctgcagtttcccaattacccaattataacacaaatttgcacatttttttaaaaaagcaggctgctactgtttctccttatacaaggattttagtcactgtacatcttgtgtctttaaataatgtattaggaacattttcaagtctgtaagtgcttttttaatgagagtgtgaagattttaatgggactagattgcttttcatgacatttcagagtgacttaattgtaacaatgttgagaggctgtattttaaagtttgctaagtatgtctgtgtggattatagtcagacacttaaaaggacggatggttggatagtggaatcagatagcttttccttactactttctccaaatattagctctttgcaaatatggttataccaaaccaggcacaggtcaggattctcttaaaccttttaattttcagataggaacagaggctaataacagaccaatgtgggtaattttagagacaatttccttaaaacttagttggactgcaatattggtcctaaggcctctcctctctccttttgtagacccaggaggccaggctgtctttgtgtatacttcctgttagtccctgaactctcttccctgtttgctttaaaaacatagtgaccttgaccgggtgcggtggctcacgcctgtaatcccagcatcttgggagggcgaggcaggcggatcacgagatcaggagatcgagaccatcctggctaacacggtgaaaccccgtctctactaaaaaaatacaaaaaattagccgcgcgtagtggcgggcgcctgtagtcccagctgctcgggaagctgaggcaggagaatggcgtgaacccgggaggcggagcttgcagtgagccgagatggcgccactgcactccagcctgggcgatagagcgagactctgtctcaaacaaaacaaaacaaaaaacaaaaacaaagcatagtgaccttgtgcctcatttttttttcaggtatttgagttagcgtttctaaagcattatgactctccagataacagtttaccgttttaatgattggaatttcagactcaatttttttcttatctccaaaacaagaaggttattcagaggtcttttcctatgcaaacattattaggattctagaacctgtggcagacttctcaaaattagatcaaatggtcagacactttcactatctttttttttttttttaatggtcttgctctgtcacctaggctggagtgcagtgccatgagcattgctcactgtagcatcaacttcccagggttgagtgatcctcccatctcagcctccttcctgagtagctgggactacaggcatgcaccagcacacctagctgatttttaaatttttttctagagatgaggtctcactatattgcctaggctggtcttgaactcctgggctcaaacaatcctcctgcctcagcttcccctaagtgctgggattacaggcgtgagccaccacgcccagtctcctcagtgccactcttaatagaagcttgtattagtttccaaggctgccataacaaagtatcacaaactgagtggcttaaaacaacagaaatagtctcatagttttggaggctaggaaatgtgaaattaaggtgttggcaggaccatgtttcctcttaagcctataggggaatctttctttgcctcttcctagcttctggtagtttattgacagtctttggcattctttggcttgcagctgcataatttcaatatttgcctttgttgtctcttagtgttctccttgtgtctttacatggccatcttctggtaaggacatctgccctaatccaccctaatccagtatgccctcgttttaacattggtgtctgaaagaaccttatttctaaataaggtcacattgtgacatactgagggttagggctttaacgtatatttctgaggggacacaattaaacccataacagagttctactttgaaaagtgcctaggagattctgatgcagcctgcatgggttcccaaagcatgattcctgacctatctgtacataattcatcaagagcactaacaaacttacaagacatatatgtataatggtatataagtatgagtgatatacagaagaaaaataaacccaaaactcatgtactcatcaccctgcttaagaagtaaaacattaccagtacctttaaaggctctggaaagcctggggtgtttgtttaaaacataggttctcctctgaggggttaggtcagggaggtttggagcaacaatgtgtattagaattcagtaactttaaaaaaaaaaaaaactccacgtgcattttaaagttggtctttaaaattttactttggagtgggatgggattttttttttctattagcgaatagaaaacgtgcaagaaaagatgtagtaacttttttcatagtgtagtagaacagtctttggctcctcttctttttgtgaggtttcttgagaaatctcacctgtacttggtataattttccaaattaatttagatctctgacccagagagacttagagtgatgcacagtcatgtagggggaggatgtgtatgtgtgaagggacctgttattgattatacgtcttacattcttgcctttcttgtgggattttgtgaagattaatatctgccagataggtttaagtttgcaaaatgccttgagttccttgggggaaactgttacataaatgtaaataaattatgcagcacctgaatttggttgttcatcattttttatagtgtgttttaattaagaacttagtgctatttaagttggatggctggggagagggtttaatcactccaagatggttaagtaagtaggtaggagcaacatttaggctggaacccatggaggaataaatgaacaagactggagaccagtcattttccatggcatttgctgagcggagctgtggattaatgtctcttcttgtacgtgtgtacatggtgctgttagaaaatcagccagtttttcactacactttgtctcggacctgtagataccttggacctctctggttttcctgagtaagctggaaaccctaacaacagccaaaacaaaacaaaaacggagtttgtcttacagtctaggtacttggggagcaagaggcatccagcaaactgcattggcttttggtacactgtgtttctgtagtccaatgagctgggttccaaactacctccttttgcctgttacatacagctttgtgttccagtggatgatactgttccttaactcttaaagagtggacatacgaaacagttgccaacaacccgtggtccagttgtgcctcctttgtttgctgctttgtcagagtctcactgtatgcttttttttttggcctttggcgctgtgagcagagtcacctcatcctcctttccgtggccaactcaaagacttacaacctttctccctcattcctatgtatctacagaacactcactagttgctaactagtggatacatgtgaattatgttttgatgccatagggctgtctagtggaggatacaaacattaaaaaaaaaagctaaatccagcaaatagctataattagatgagggttatagagaataaccacagactctttcagagcatataaggaggcgaatctaacccagtctcggattctggcaaattgcttctgaagagtgactctcagcaaaatctggaaggatcactgggaagaaattagcaaggaaggaggaagaaaagagaacagtgccttctaagaaatataccatgaagtcatttttttcctattcctttctctgcccttttccttccccacacagtcttatgcagcagcacaattttagccatccaaactgggccagttgttttgttacactgtggatggttggagattgagagctatgggaatgggtaggagttaaaaactgaatataaattaggtgacaagagatggcaaaatcatttattgggatgattaacttattaaattgggctattcccatgctgtttttctaaaattgtgctctgatggccattttggaagcctggtactacccacagactggagtatgtcctaagtaggttaagagcttgggaaagatgcttgctgagggagggccttctttgtactctttctatcaataagaaataataaagagttaaagcatcgttacattttagatatactttctcaaactgctgacatcagaattgccaggagcctgttaaaaaggcactttctgtagccttcctatcccaggccttctgaattagaatcttagcagtaggattcctggccactgtaaagtactctattgaaggcgtggattaccagtgggttattcagaggagaactttcatcattttagccccgtgggtccctgcctgatttcctgccatctctcactaccaggaccagctatgtaatttgtgaggccccttatttaaaaagaaatattaggaatttcgagacagtgatggtagagcattaaaccaagtatggggccctttctggatgtaggtccctctgggattgcacgggttgcaagcccatgaagatgttcttgttcaccattcctgtttgcctttttaaaatgctcctgcagtaatgaactgcttattgctccctgtgcatgatactgttttttgcctttgtcccttgggtctcactatgtggcatgctgtgtttcatctcttttctgtcacctgggcttacctcagtttttgcacatactgcgttagaatcctgtgcaagtcgcccgtgctatgctgtgtgctttgagggcccggatctgctcttcctcatctttatattccctgcccttagctgaggctctgccttggtcttctgttaagtgtgctgaaagggatacttttttaacctgaatcttttcttaaaacctaattaggttataggccattgggaatgcagatttggttcagagtgaggagttggaggctgtgttgccctagtagtgtcgtgaggactgcctgggcgtgactggtctgagacagtgtgaggaacggggtgtgaaacaaacttatgacatctctggcaagtagtgcatactctgctgttgacacctttgatagctgctaccctctgataaccagtgtttttttttctggatctctcattgaactctgagtttctgggaacagcagatttttctgagccacaggttcagatgtgttagcagaacctgaggaaatgtttcttgcaccaggaaggtggccattttactccgtggctaatatttggaactagtcatttctggattgtttgaactagcgtgttctggggaattccccaaagctggacgcacttgttaaatgaggttatggctctgtggggtgagaaatagacccgcctactatacttaaaaggactgactgtgtttctgccttcaggtaaccagaggtagttatgaatttgggtgaaacctcttcatctcatgatagactagcaactagaggttcagagaagttacacagaatattcaaggttgattcagatagtgactgaattgggactagaatccatggtttctattctgtggattttgagtaagatcactaatcaacatgtgaaatcttccttgtgtcattcaattagaatttaagtgtcaaatggatggtaaaatcatttcttagcttatgtagatcataaagattagcaaatcaaggcagaaaaagacccccacacatatttgttgccaggtctgcactaatttctggataaaggttagtatatatttggtctacagggtgtgatttgagtgtaagttttttctttagtttttagattattgttcaaagtccccactgacagaatgcagggagacagccttgattagattaggccagattagattaaatcgaatggttaaggcctttggagcctccagcttgtaggagacaccataatggccttcatagcgtccttaaatcctattaggtaagttaatcttattgaagatttcaggtctgcataaagcagtattgctcttatactctctatggtgggctctgcttgttaaggtgagcaggcattttaactttccgggaataagttggttttattggtttggggcaagttaatctaaataacttgaaagtagacacctgtgcctgatagagaggccattccatgtagcaaaataggctgtctcctggcttcccctttgcttggtggctgttagtacctgtgacagggattttttttctttgccctgatttggggaaagagagtcaggtgagatgtgtaataataatgtacggagacagtagtatggttatgacactgaggcactactagatattgagaataaagcactttggaacttaggagctggaagcattcttagctgtcattttttgagtgtttatagttttattataggtgctagttggctcttgcctgtttctacaggtgcagtgaccatttttctgaagcaaaatattcttgttgtcacaggcttttcctcaatttgtgaatttatggacctgcaaagttttacaaacacatgaattatgtcaaattttgtaatgtcttttgaaaaaaagggggaaaagtgtaagaaatttagaccatgtaggtctgaaagtatgcttactacatcgatagtgggggctggaggaactgtgaaaaaagtaatagtaaatttccttttttagatctttgccaaaggtagttttgttagatataaacaacttcaagacccacaagtgactactacacactggattggccttcagagatactgggattttctttccaagtatctttaaaaatgaggttcgtagtgctttagctaggaggctgagtgcccactattaagatcctgtgagttaattggtttggttcacaaactaactcatattgcagtgtatctggctgttttgtggctgggagaaggttcctgcattgaagggactgaagtgacactctgaccttgggacttccagtgctgttgtggagtggggacttccttcttcatgtgggcttgctggctcttcatttattgtcccacctgggctctgcctgttactcttctcaggccaagaagtgagttaggttccttatttaacttttctaatggggcagctctgcatctgtgtcctgtccccaaagactaaagagaaatttcaggtgtgggccagattatggagcctgaagaacagttttatgattgattaatggttttgatttgcttttaggaagaaaagtgcaactagcccattggatgaagatagtatctctctccagcactcctgtatcaagtgtacagtgttctcttcctgtatagcacttgtattttcaagagctagggtcattgagagaacacttctcactcatgagtttcagagcgtagcagagtacacacacctgaagcaagaaatgtaattttctctaagtgtactaagaattactttaattctctgtatgtgcatgcatgtgcccacataatggtggtgggtttggttttttttttttttcatgctccttgaggagaaataacccgttttttgcttttattgattcacgattacctacttttcagggttacctttgttaggaagcagctgctggaagaatgtgtgctcattttgtacttgtgtcctttacttctatgtcctctctgacctgaggctcaccctgcctgccacctcctctgcatcagcccagctttgttcttctgggcctgttgtttccactctatgaagagacctccttacttctctctgtctctacttagtatccatttctgctgaggcagatccagatgggcagaggttggggagggaatttgaatgaggggaaaaattggatcagttaggggaaatttataaaacttctgtattctgtgctaatagttctcagatgctttggaatcataagacgggatgttggtctggcgacctttgagagctgctcttaaccagccagtggacagctatgcttgctttttcttcctgtcaccatctctgcttttcttgcccaatttgccaggaagagtccaccaattcttcataagcccactttttattctctcttttgaagtcatcttgattcacttcctacacctgcagcccccagtcttgcttgatctagctcctaatcttctgcttccctttgggacagaggagaagctgctctcctcgccatgctttgctgacatctccaaggggaaggagagcacaggccctttcatatcctgccccagaccttcacagggagcagtaataatgcctaaaccttattgagtacttaacatgtgcccagcactgtgacaaacacttcacacagattatctcttaaaatattcaggccagcccagtaaagtttatgtactgtcattgtctgtcttcaatttgcagatgaggaagttgatgctcagggaggttcaataacatgccattatgtacacagctgaaatgagtgatgcaatcaagattcaaactaggcagcccagttccagggctcttgtccaactactcagggaaaggttttcgaggtcactgccaggatagctggacttgtgacggttttcctgtttgagatatctacccttttacatcaacctaagcacttactgtctttatattttcaatgaactaagtggggtgttctgggtggtctttgatgatggcaactgtgtgttttaaagaaccagaaagaaaaatgtttagaggtgggcttctttagctgtagtccctcttgactgtgtggtcaaataatagggctcctgacaaggaaataaggctataagtgctcttgctttgtaaagattagttaattggtagaggttgtgtttctgtggttaatttgtgctcctgtcttagcaatacatgagtatccacaggcagcaagtgtgtcgcccagcagccccataaaacaaggcactcttcagcaccagcatcagttgatgcacctgaataacaatagggaagcttgttgaccatttggcacttcacagcctagtaattagaaactgtaaaacaataatacagacatgaagcaaatcctccagttaatgaaaaaaaaatctacaatcttgcattgtggctgagtgcaaaatcacaaccggccgcttatacagcaaagcaaacacttcaggattttggcagctgttttgtggatataaaaagctctaggctctgtattaatttggggcctgtcatattttttaaaaactgaaaacaattacctgactttctagttttttgttgttgttgttgttgttgtttttaatttactgcagtggttctcaaattatggtccccagtccagaagtgtcagcgtcatctgggaacggttagaattgcagattggtggggcccaccccagacctactgaaccagaaattctggcagtgcggggcacagtaatttgtttttacaagtcctccaggtgattctgatggactttaaagtttgagaaacactgagggtgtgggaagggtaatttgggggaagggaagtggagtcccctcttggccccacccagagatgagcttctctgtctagtggtgggatagttggcttgagatgtgatattgagaatatatgaaggctccctactgggtcaggaagttgggggagtgtctcaggggagggccgtgccttcctggggacctgtttaggagaagggtcctgggcagtagcttgttactagcctttcgggaacaatttcaatgtttcagtcaccctctgggctgttgtactattgcagtcagccctgctaggcccacaagttgtatggggcagaggagaagaggcatggggacagaaaccttatatcccaggcaaagccttagcaatgctgctgatgtcatatgctcatcgttgtcaagaattgaaaattaagatagtgatgaggtggtggcaggacaaatttcttcttttcactgtatgtcccctttctcttctggatctcatttccctgcctccagctatcttggcagatgggattatttaataattttcttggggcctgttggcaaatggcccctctgccccttccccagtgtgtggtgaccacaacagtgacatagcttcatttcacagccattaggaatcttgacgcagctgacccctagatctcctggaaaggcctcttgggaaatataagcttgccaccagagtgaagtgaattctcgagtggtattaccacagaggctcaggttcctgatgctccttggagtgctaggttaacagtctctctgttggggaaaaacttgatacaaatagaagatttgctaattttgctcacatttcaaaattgtttaatttgcttactttttttttctctttcagactattgggttttatctatcattccttttattttacaaaaaagaacatagggcatgttggccagataatgtatcctgttttttgatttaatcacccaacatagcatgggaataaaaagctgaatgagatgtagccttgctcctccctgacattgaagagactggcttctgggagaggaaaatgaccaagaaaagaaccacccagatcttgggttcagtttattctctctgtattttcaagtggcagaacttgcttgaatatgtgaatttgatgttggatcacaagcccaacatgtggcttctgtgggcatatgtagttattttggattttattttattttaaagggtctgtgtcctgttggcttttaggaggtgatagttgctgattctcctttcatgtgacattcagggctcatggagaagtcaaaggctcacactggtgttcaccttcctggacttcaggaaagatagtccttttgccagatgaatgggaggatctaagtctgttagatttccatgagtcgtgcagcctttctggatcgggacaggaagactgacccactgtccttcccaggctgcctgccgttcatcttgctttaattaaatacacagctgatgatgtcagcttggctcccggctccttcagctttcccctcagaacaaaacatccgggcagacagttgtgacaattaagtctcaagacccaagcttagtttgttctgaggtagttaagataaatctgcctaagcatctccaaatgcagataaaacctagtgctgattagaggtgaccctctaataaacctgatttgattaggcagaaccagcgaggtgcaggcaaatatttgagactctggccaagctgatattccattgacctttcacttaggggaaaaaacctgtttgatttttttcctatcccagagtacttgaaaattattacctatggcagctaaagcactagggcgaaataaacaggtgagacctgtggacttgcccttaagagtcgcagtcagctaccacctgggttgtgcttgcttcctggcagatcagtggagaatggattttgccggaggtcctggcctggaatgataattaaaaaggatgtttcagaacacacccaggtgcgttctgataaagcctgagcagatgtgggtggtgaaggattttttttttaaagtcaaactttgtttataaaggtaacttctaacaatttattatagaaaagtcaaactagaattgcattagtttgtttatatcaagacctcattagaaattaaggagaaatttccttaattgctccatctctggctcctgtaacagtgggcatacttctcttcttagcatttatcacattgttctgtaattgttggtttaccttcccttttgtcttaaaaagcagggaaattgtataattattcttgatgttgctcaaatgcttggcacctgggccaggtacagggattggcaaagtttggtccacaggccaaaccaggccactacctgtttttatgcggtcatgagctaagaacagtttttgcctttttaaatgattgaaaacaaatcaaaggatatatatttcatgccacgtgaaaattatgtggaatttgaatttcagtgttcataaataaagttttattggaatacagccatgctcattcatttacgttattgcctttggcatcattttgcactacaacagcagaattgagtagttgcagcagaaaccatatggcctgaatagcctaaaatatttgctatctggcacttcacagaagtagtttgttgatccctttcctattatatagcaggcatatagtgtaaatgcttattgtttgaattatttcaaatataaatctgagtttacaaatagagttattctgatcctaaaagtgttcagtgaaagttagatgaatgactgaccaatctatttctcttgttattcatttgtaaccttaggtttaagttttagaggtagtggttcgtttattagagctagacaattatatactatttctcttctgagaaactttataaagagttaatccttattacttttctaggttctgaacctactatatgggatgcagagacaccaagaggcacagagaggttaaactgactaagacacacagtaaagaaatggcatgactcttcatgtcttcatctctttctttgtttgctaaagccattctttgtgatgaaagagaagtcaaatctggagatattcatgagcaaactactgtctgatactatataatgcattatttcttatagacatcagtatctttgtaggctctttggttcattaccagggaaattcatttaaaaaaataataaatatgtggtttaaaaagtaaatactgcagagaatgatagcaattaccaaatgtaaacaatgtggcctttgagaaccactatgaaattgtttagtgaattaaattattatgcttttgctattcacatatccacttccattgactgttaaggaatatgcttcaaggaggacagatgagatataggtaaagtttatttttaagatacttaggtaaaacaaaataaaccagcaactggcagatgtttggtgaccttgaaatctggcttttgttttgagacagtgtctttaaaatgaccagtgccacaaatgtaaacaggggagttggagggcattggagtattcaggaagaaagtgagaaatcagtaatttgtagaacatgactaactggaactattgtttggtctgctggggtttgagggagtagaggaatttgtgaagaaggaaagaaggttaggagatgcatagagcagagaaacaagggtctaagctttcctaggaatctcaggtcagacccttgttaaattttgtccgtatattcattgtttgctgtggaatcttttaggagagtgtaatttttttttctgtttttctcttattaaataatttaaagggatgacattcagggctttgggaagcaattttttttttttttttcaaaacgccgctatacctactaattggatatccatcaggggatggatacttacaacagctctgcatgatagggataatattcctattttatggatgggaaagctgaggcttagttgtttttttttttttttttttttgagatggcatcttgctgtggctgaggcttagtttaattggctttcccgaagttttacagttagcagccagagccaagtttcaaacccaaatctagctgactccaggggccttctgttgtttctactatcccacttcctcagtggttgcatcccagagatttcatcgtttggtgcataaatccagcctaaagccatacttcaccattttgtgtgaataaatctcttcctcattttatgactcagctacctgctttctctttctaacctgttattttgtacatctgatttgttagcttcccatgttcccttagcttccctgcccttagttgttaacccttttgatcaatatctagttgattttgctacttaataacagactttagagggacttcagaggataaaaactagaacctccaccctactgaaaaattacatttggtttgccgttggtagtatgtgccccatccttctgccctggcactccaggggaatcaaaaaggaagagctgagaaacagcattccaggcttagaggctccacattctttgggtttgttggaagacttcttggcagcattgaaagatgcctgtgttttcatactgattttccatcctgggccacctgctttctcccttcctgctgttttccttttgtacctatgtggttggtgcttctggggctttttatagcagctttcatcatttatactactgagttttgcaggcgcttttcttttcaatttttgatgtttgacagtatagacttttatttatttatttttaatatgttcacttctgaacctttttagacttcatggtgacagcctccaggagaggaaaaacaaaacaagggaaattctaggaagaggcagaaggtagttactattgatttctctggatgcagatcctaactgttggcaaatttaaaacttacttattttgagtggaggtggttctgtgttagtgagaagttgatctggaaaagatgctgatttggacatggctgttgtaaaactaatgatgaagcaaaacaaaagaaggaatagtgcattttggccaggcatggtggcctgtaatcccagcactttgggaggctgaggtgggcagatcacgaggtcaggagatcaagaccttcctggctaacacagtgaaaacccgtctctactaaaaatacaaaaagaagttagctgggtgtggtggcgggcacctatagtcccagctacttgggaggcttaggcagggaatggcatgaacccgggaggcggagcttgcggtgagctgagatcgcgccactgcacttcagcctgggcgacagaggaatagtgcgttttcactttttaaccttagttgcacagggtatgttgaaagctactgttggcttcaccatgtcattgggaagtgggaacgctgacaatcaaagcagctaaacaagaagcaactcaggaattatgacattggcggcaagtcttttgcccctcttcagaggtaacactactagatctggagagagttctgtacattcagggaatcttcctgatctctaaaaaatttgagaggactagagaggagtaaagactggaacctggatagattgatttgtgagggacaaagattcagagaagacattttcttgaaggtgatgaacctgctttaccaaaatgttgtaaaaattctaaagaaaagttaattggatcaagttgacaataaatgttagaagggaaaaatcttaaagggtaaaatttgaaagtagaaagtttgtcctgtccacagtgtttgccatttcatagaccaaggtggttgggggaggtggggcaaaattactgtagtttccagtgatcattgccttctctcggtcctataaatgcaggcactatttagcactgaaaccatctggtgttggtggttgtttcttatgtcgtatgacctgcctctataaatacattgtgtataagcttaactgggacagtaattggtgtgatccttttctttttctgatctctaaggtctgaggcccatgaccaagggaaagagaagtgctttttaaaaaaacggacacttttgttgttttggtctcatggtttcactgaggtagtgttccacagtgtaagacaggttaggattgtatgttccagaattatgaacaagagtatccttgggaatgataaaaaccatgctgcagtgttgcatgtgtatttgtgtgttccatgtggaagaccttctgggctgtgtctgtctttgctatttatttatcacctgaaatggtgctgctcaaccactctgtgacagtgttattttaacttgaaatagcatgagggttaggagaaaatacctcatgaatgtgaagggggattctcctgggcgtatgtaattgcaatgatttgaaatgctttcacaggtttgtaggagagggtaatttttcttctttatttgctccttttatcttgttctaaagccagtattacctcctctcccaccgcccatgtatacttcttattcccttctccttccccctccctttctcccactctccatgtaaagaaactctttcctaataagaatcataggtattcagagctttttttttttttttaattaacagttgatttgactttttagtactgtgtaggagatgggaaaagtcagggccatttgatagtaattgcttcctggaagagccgaccaacttattataagggtgaggagtgtttggaggcattattttctggttccaggtgtgttttgagtattgctggtggtgctcagcactcttgacatttggggctggattactgcatgttgcaggagtatcttgtgtattgtaggatgtttagcagcatccctggactctacacaccagataccagtagcacccctcaagtgtgacaaccaaaaatgtctccataggttgccaagtgagggacaggatcactctggttgagaatttctgccttagaaagaggaaaatggattccctggaagcagaggttagccattaaccttatagggctggagccttcatttaaatgctttggtatattgaaagcaccactcaagtatcagtggtgagggcacatttagcttgttgaaattcctgtgtaattcataaatatcatattagctcttggcttcaatttcctaacactagaaatgtagatttttccccttattttcaaaatgaggaggattgtagtaaaatatagtaatctctgaggtcgctcccaacccttacattttatgattttagttataacagacatcttatggaattacacaatataagagttgaaaatgtatttgtgatcatttagccagccctcttctgttagttctatcccgtgtgatttccacaaatagatcagaccagaagaaaatagttgctttttacaagtggatgttattaaatgctcatatttagaatatttatcagaacagacttatattacagtgtttacttttctaactgattgagattcaggtgacttaactgcctaagcttcaactgtctgttgtttggaattaggcttttaaaagttggtctttatattaatattcctatgcctaagctggtactcttattgtcaaatagctttatgctctgttacattaatgagggaaactttgactttccagagtgccttggctgatatattggtgttaaattggtaagctttctatcccaactgctttatttatgctttaaacataaatgaaagcagagaatttttttttttggcctgagaggtagttaagagggaaatctaataccttttatgggtttatatgcttcatatgtgatgtgcccaaccagaaataataagatacaccccagatgtgaaggtaccagctaatataattatgctggagatcattttcaccttttgagggctgaattacattgaattcatttcttcaactctaacaggatttggtatagttacttaaatttgaattgggagctgagatgaagtcccaacacttgtgcttttactggaaggattgggttgtgtataccttttgtatttctgaagcttgataaactataaagccttgagtattcaggttcatggcaaggtttagatggatggggaggtatactctagtagaatctaacagcttagtatgctttctgtgggctcttgcctggaaacccaatctgaaggtatagtgatcagacacaatgctattcttaagccttcttggaaataacaggtgtcttagcctgtggtaaaaaggtaattttgcatgtattaaatattcaaccaagggcatgatctgtgcttattttggcaaacaaatagatcccaaaatgaatcaaacaaattgtaatgcagaacaaatttaaatacttgaggatttgttttagacatttaaactcatattttatcctctgtgtcttcatagtaccctcagaaagaaaagaatctttggaaatgtcagtgaaagggcagtataatctcacactgcagttgtggttccggactcagtctgtgtgcctgtctttcctttcactcctagccacgtgacaacacaaagagggtacttaaagtgtttatttcaccctggaagatttttatagagagcactttttaatgaagcacagcacatggcatcattatcatttctaacacagagaactcattttcaattttgctatcaaagaaaaatgacaaatagagaatgcaagaaaaaccagatggactaactgtattaggagcttagtatgcatattttgtgtcacatattagcattcattaagtcaaaagggaaaaaaatgagttttgcctacatgcattaaaccaataaggctggcaaagttccaagctagctcttgtgaattaattgttttataactgttttaattaaaattgttcagtatatgattaacctaaaagttttaatttccacaaaactgttgaacaaatgagacattaatattttacgttaaccatggcaatattgctgtggttttcagagctctgcttgttcaagcaaagcatggcaagtggtaggtggaaagtaccctgtgtctcatgccactactaagaaaacctgcaaatcagaagcaaattctatacacaagcatttatgtaggcatcgccccaaaccccctgttcagacagtctagttagagctgggcacctgtcataaattgtcaggttgaagaggttaacgatataacatggcaagaatacatttattgtctttttcttccacctggcttcatagtagtgttggtgtaccgtgtgagatccttagattagaaggggttggccagtagggactatgaaatgattgttgttaaattctaggggtttaatttaggatataggtacaaatgttagttctggaatcaaagggaagaaagagaagatttggatgacgcatcacctttacttgaggttctttaggttggcatcaggctaactttggtaaaaccacatcccattttgcaaatggtaaaacagggttggtaaaatttcactgtgtatagctgtggctcctgaaatacacagatttgcatttctgtcactcctccctctccccactttccacatgtacccccatcctaatgtacttcactttgttaaaagatggggatgtctttcctctctcctcccctaagcctttcactttgctctgtggatttgggtcatggtgctgtataaattcaaggtaatgatggtatttgaaccccatagaaggatattttaagagataagattaatactgctcagcataaatgatgataaaactcaggctgtcctaaatgtctaggtagtgatgcattttttaaggcactagactgagcttaccttttaggttgtatgacacttgatataagctgtccttacaggtttaaagctgtaggagtctggaatgcaaaactgaaccacagaagtatattggccttgcacttacatagtcaggatcatacggcattgtgatctatccagatttccagctgcagtcctgatgtggtctcttcattactttgtccagctgtttcttcccagacggtgctctgtgttagccttcccttctgtataatcattctcttccctaaatttttctgtttaacttgttaagcaccagattctgaataaattattcatataatcagtatttttgaagtagttaataatcagagtataataataaattttatgattgtacaggttgccatatttgccagaaatcagctttacacaagtgatttttgagataaatgctttattgggcatgttgctatctgttcatttcttcaggctctcttgatttctattattgtgtgaagttaggccattagaaatgcgcatacctggaccatattatttaggctcttcagagaactgccatcacggagttagagtgctatgtccttggtaaatggaaagtaagagccctcaatttaataatacagtattttatagtcaaataatacatctggcttttgtaaaaccttaaaagtaatctggtatcttaatgtttcattatacatatgcatatatgtgtgtgtatactcacatgcatatatacagacatacatatgtgtacatatatttacacatatacgtacacacagtcatacacatataaaaagcttctctaagaatttggagcgaggaaaaaatgtctgtcttctgaccaacatgtatacattcttctaactctcatgtgtttgtttagtgaatgaatgaatactatgtaattaggtaagagaactattgccttaccctggaaattcgaatcgtaattcagtaaacaattttaggtacccatcctaagtacttgttgatcaaatactattactcttttgcttggtgagtattatttttcatctacttttaacaggttcttctttggttaaaaactgacttctaaaataaaacaaacagaaaacctacttacttctaagccgtgatatgtctgtattggaaaataggcactggcattgcaccatgttccccatgataaggaaacaataagaggaatcatgcgtatggttcctgtcctgtaaagtctaatgggtggctcacacctgtaatcccaacactttgagaggtgaaggcaggaggattgcttgagctcaggagttccagaccagcctaggcaacatagcaagactcccatcttgacaaaaaataaaaaattacctgggtgtggtggtgtacacctatagtcatagctagtcgggaggctgaggtgggaggatcgcttgagcccagcatattgaggctgcagtgagtcatgatcatgcccctgcactccagcctgggcgagagagtgagactctatccccaaaaacaaaacaaaacaaaatacagtacatgtctggcaagaaggagaagtacctagctcagtccattttctactgaaaatgggtaatatataaagaaaaggaatttatttcttacagttgttggaggctgagaaatccaaggttgaggggccacatctggtgatggccttctcactggtggggactctacaaagtcctgaggtggcacagggcatcatgtgcaagggggctgaacatctagttcagatctctcttctgataaagccgctatccctactcccacaataacccattaatccaccagggcagagcccccatgacccagtcacctcttaaagactgtatctctccatgttgctacattgaggattaagtttcaatgtgagttttggagcagatgaacattcaaaccatagcagtgccaaaatcaagcttttgttttgttgtgtttttttttttttttttttttgagatggagtcttgctctgtcgcccaggctggagtgcagtgagatgttgtcttggctcattgcagcctatgcctcctgggttcaaacgattctcctgcctcagcctcctgcgtagttgggattacaggtgcacgccaccacacctggctcatttttgtatttttagtagagatggggtttcgccatattggccaggctggtctcaaactcctgatctcaggtgatctgcctgccttggcctcccaaagtgctaggattacaggtgtgagccactgcacccagcccaaaatcaagattttgacagtggggctgtaatagtagtttggaatatacttcatttattctagttcttttctctattttattacctttctgaatgtgctctctgctcccctggggcccattcccaatccagtagcggcaattaccattgggataaacctcctacctctgaggcccacagttttcctgaccatctctctacagcctcacttccacctctacctctccataaaacaatgtgtatacttctgttcatcagctaaatcactatacctatcttacttgtttttctgatgcaacaagcagccttccaaaaataccaccaagtctaataatccttttgctgtttagtacatcttttgtttgaggcttactgtcacatgacagatgatgacaggcaacaaatgactgtttaaatggtcaacagatgtgcccatccaggtgactctcctaatagttgacacacagtgggtggagggattgggttgttccagatattccctgttgttgggctagcttgctcttggtgattatagtttgacttattttgcttttattcagtttttgtggttctgttttgctacttggttttgatacatgtaggtagtgtgggttccattttggtatgtgaaatttcatatcatgaagaaagttatgattataatgtagcgttagtaattcccagtggtcattcccaaaaaatattttctgagaatgccaggtgtatataaaagttatttttgaaagtacacatgtagtgtgccacaccctctatcaaaacaggcccacattactgaaagaaggagggaaactacccatccactattactttacagtacttaaaatatgcagacaaatacattttagcacgtggtgatctttgtgaggatatcctgtcaatcaagagagtaaatatcttttctctttcccatgaacctagcaaccaatttgcttatagttccttcaaagctgttgttaagattattttgtggctggttatgtcacttggctagaaaaatggtactggaattaagtcagctttagccctatgctgcccatctttcttaacttatggtcagccatatgtttagaccagatgaggtaggaggtatgattggatacaagtacattcctggaaaagataaccaaaatcatgttctactaaaagtgaattactgtgtttttttccttcacataagaacagcatcttcatacctatggcaagaacctgtcatttttttttctgatcacatatgtaaaaatcatttgttggtagtagcaattaacataaaagtcaggttagtgatgtggttggggtgagggagatttgaccattgagagacacacaagggggcttttgaggtactgtaatgttctctttattaaccatacctgtggttgcaatggtgttcattttataattcttctgaaaaacagacatgttttctacattctgctgtatgtgtaatatattttgctatatacgtatgttttactggagaagaatttcaaaaatacctaaatagcacaaagtagaaaatgttatcagtaatcctaacactaagaaataatcgcaatttttttggacatgtatcttcccagtgttttggggacaaataaaaataataatgtatatctactcccatgagttaagattttaagaatgcatacatgtatgtatgtatgtgtatgtacaatatatatgtgtgtgtatatatatataagtatatacaaacctgactttttgatttattatattgtaatattttgacatgaggtttcaggattctatagagttaattttaatagccatatagagtaccattgtttggctatatcatattatttgcccaatcctgtattctctaacatttgcttgtttctaatatttatgtgttataaataacatgtatttatcttgtaggtatttaaaatttaaataggctaaatgggacccttctttatgtagtatgtagatatttcataaaaggtacattttgttgggaaagataactctggcttcaaatgctttttgaaagatgatttttttcccctcaaagaaaattgaaaacaatttcactttttttttccttttatgaagcatgtgtgtgtcatttgttgtaagaaggatatggccctgacatcttcatactcgattgttctctgtgaagttattttatttattcacttattgaactcatttattgaacaccatttgtatgccaggtgctttgttccagatctgaggatatagagatggagacctggtttctgctttcacagcctggcgacataatggatagcagggtttgggatgttgtctgtccatagactcttgagtttatggatccaaatgtttttgcttagattactttgctgtgatttttattattagacaggtgatttaggagcttatgtaccagagaggctgttgctttcctccctccccagcccttccacccccagactgtatgttcttctttaaggttgagtcttggaattcagaacttggtgagcaagacctgactagaacagaaatggaaatgaccttttcatgcacagcatgagcatgacagagaatgggctgtgtgttaactcctctctgatattgctgaggtcctttccagccctaaaattctgtgatttttctgatacttgggcctttgaagatcctaatacccaatcctttctcaaacattaaatttgtagcagaggggaaaaattaaattcctcctttttgagacaccagctgaactttgcagtataaatagactcaagagtgaaagaaaggagaaaagtgcattcacccatcccaggaaatcagatggggattgagagtgtgtctgttcatcttctgtaaacaaaaccattagtaacatggttgttttttacttgatccctcaaaaaaaaaaaaaaaaaaaaaaaaaaaaaaaaaaaagcagctgggtaccgtggcacgtgctgtgtaatcccagcactttgagaggctgaggctggaggatggcttgaacccaggagttggttaccaatctgggtaacataatcagaccctatctctacaaaaagattaaaaaattagccaagtgtggctttccaactacttgggaagctgaagtgggaggatcgcctgagcctgggaactcaaggctgcagtgagctatgattgtactagcactgtactccagcctgggtgactgatcgagaccctgtctcaaaaaaaaagcatcgttttagggtttctatttgaatagacatttctgtggcttgagtttcgagttaggaatgttttggcatagaaaaacctgttggcccagaaacatctggcatcattcacaatcaggccaaagtaaaggaaaactaattttttaggtagaatgttggcacctggaagaatggaggctgtaagttcttttgctggcaaagtataaaaagaaatgtttagtggacaggtgtgtgagttaaactctagagtataactaagcagtgtggctgcccattttttacttgatttgcttgtgcttctaccaccttcttaatgtgtccctggaatgcctacatgtaaaaggattctgatggagaagaaacttctagaccttaagtgactgtcctggttccagcactcatttagttgcataaccttgggcaaatctctcaagaaatctgttccgtcttctgtagaatggggtaataaacacttactcagcctgtttcacaacattgttggaaagattaagaaagcatatatgaaagtatgtactataaggtgatacttaggtattataaaaaaagtgaacagggatcagcacaaaatgttttggctgctgctgctgctggtgtgtgtgtgtgtgtgtgtgtgtgtgtgtgtgtgtgtctgtgtgtgtgtgttttgtgtctctgtgcctttgtctgtgtttctctaccaccttagatttggcagccctagtatctaagtgtgaaagtttgggatggatctcagggtttttttggtaatgatgactgactggtatggctattgaataaaatattgaagatgctattggtcctttaggacaattagttttgtctctctcctttaaggtcatttggatgaagcagcagtttgtgtagaggatactagtttttaagatatttttgtcctattttattttattttattttattttattttcactgttattccacaaaaatctttgagctggcttacaaaaatgtgtacaatgcaacagaattaaaataagtagaaaaggaattggggcactgggaaatgggtagggaaaatacaataaagccatgttaaggcttctgggcagaaacatgcaaggcagggtctgaggcagtaggttgagggggggtcccatattcagcttcccagagagtagaacaaagaggggaacgtaacttttctttttcttttttttttttggaaatggagtttcattcttgttgcttaggctgaagtgcagtggcacgatctcagctcactgcaacctccgcctcccaggttcaagcaattctcctgcctcagcctcctgagtagctgagatcacaggcatgcaccaccatgcctggctaattttgtatttttagtagagacggggtttctccatgttggtcagtccgatctcgaactcccgacctcaggtgatccacccgcctcagcctcccaaagtgttgggattatagatgtgagccactgtgccctgctggaactaacttttcttgagaaactttgtcaatggagaagatgtgtccatgaactctatcttggatatacttatcaatacacacaacggtgatttgtgaacagttgcttttataccgtcaatgcaaattaataacactgagacaaagcatgatttcaggaaagagtaactataaggggtcaagatcatgtgtctcacctagatagctcaaaggactggcttgagccaaggacaatttttagaacatgtcgaggagaggataagctacctgtcctcaggcagtctaccacaaatactctttatctcagctgggagctgacatctctccctgaaaggtttccagtgatattgtggcacaatttgttggccagaatcctagagacccagggatggagatgccagtgctgtcttgagagttcagtgtcttccctgttggcatcttctctttcttggttctggcatatctggttcaaggattagacacatgaattgatttagttctttgctggagagggcagcaaaatgccagttgtgatttttgggcttggctatgttgggaaccactgggaatttgtggactgccaataactcattttgtactagcttttgggtgaccattcagtggctgttatttcaattcatagttcagagtgactgtatttagacccatcatgtttctagagttttttcctagattcaaatcatggtaaatgctttcattagataatttagcttatgccctttttcctacttttatgtttccctgttgttactagccctagatacttaaaaaaattttttttggaaaggactgtgtgtttttagatatggggattgtattctgtgctttagtggggcacagaaggagactgtctggttaaggcaagagattgtggtgctaaaaaaggaaatttggcaggcctgttcctggtacttttagtaagtaaagaaagagaatgacaggctggctggggattgtattaaagggagccctgatcctcatatgaccttattccctgaacctagaaagatggtctgcctatgtggcagttattctatggcgctaaagacagttttgttctgctttctgccatgtatatttaggggcctaacggagagatagaaacctgttaaggaataatcatggatgttcaggcctattgcttccttcacttatccagaagccagcctcaccaatgtccatgggcaagtttgtgttcacacaagttgcttgtaacaagagggaagattctcattaagaagttggccctaaaatcaggatagaatcaggctatatttgtgtttctgtcaatagtctgaattccttattggtagaaaggtcttataattatggggtaactttgccaactaatagtactggggtttgatgtgggttacttacatcagaagtcacatcaactttttgacattagtttctattccaccatgtgctccagggaaaaggagattgatgtggactattaagccaaaaatgagaatctgttattgaaacccagaagtctgaaataagggtttagtgattgttttgtttagacacaaacttttcttcatagatgctttaacttcctaagtgagtttatatatttttctaaatatgtaatcttttaaaaatattgcaaatatttaatttatgtatttgccatttaacaggtaaaacagcaccaggaagtcttgctcctgttttgcaaaggcacatttagagagtgacagaggtttcccactgtgtctgggacaagcctcccagtgtgtctgggacaagcctgaaaagagtgccattttgtctccctgaccatttcactgattctgtacttgttgtttatgaaacttcattatgtaacagacaaaaaagcaatttcatgagcaattcctggaataggcaagtggacaaaaatttctcaggtaccttctctggaggctgtttgtcttccattctggctgcctctcttgagaactggagtggcatagtggttaagaccaggggctctggagactgcctggatctgggtgctggtctgactcttgagctgtgggaccttaacttctctgtgcttactgtccttacctgtgagatggagatgattggagtctccaccatgtcaatgtatcaacacttctaaattatttagagcagtgcctgagacattgtaaacacttaatatatgttggttgttattgtaattttaataataatagctattaaattattattctatggctgtcatgcctgagagttcatcacaggggcatgggtgggtgggtagggaataagggctgagaatctaatcagttatttttaatttattgggcaaaaatgaatcaaataaccgtggcaggcataatgaaattgaggtattcagtgtgtggtgaggatgaactgttttatcacagttcctctggtgtggcctgtgtgctttgattgcaggtcagatggctagggaaaagagtagtcaagctgaatgctctgtggtgaggctgtgagagggacaagaaacgtgggtcaggacagaaggcgtactgcaggaacagattccgaagtgtgtgcacagcatcctataatttgggctcctgtgtattttctttagttggttgcatttgttaatatgttagtctggtgtctttaaccctgtgactgacagttgacaatggtgtagctctttaaaagaggtgaaactggtctgaccacagtttacccttgatagtgctttcactttggcaacaagacagagggagaaagtccctgcttctctgctctgggaatcttaccaaatcaataaggagtctctggtagcactaacctcttttaaatagcctaagtgtgagatcctgacctttttttctgtatgtggcctacttccttgatgagaagctggcttttatattagaacttttttagacgtacatgaaacttgaatcttgctatttgtttccattgttgcttttaaaaaataattttacaaatttattctaataatatactaacgtattttgtctccaggactagtgaaactttttaagatttttaacagattcatctagacacctaaatctctctaggacttgatccttctccacccagcagaatactgtactgtgctgtgatcatttctcagggtggttttggctgagggtttttttttttttttttttttgagatggagtcttgctctgtatcccaggctggagtgcagtggtgtggtctcatctctgcaacctctgcctcccgggttcaagacattcacctgccttagcctcccaagaaactgggattacaggtgtgcgccaccacacctggctaatttttgtatttttagtggagacggggtttctctatgctggccaggttggtctcgaactcctgacctcaggtggtcctcctgtcttggcctcccacagtgctgggattacaggtgtgagccactgtgtccggccttggctgaggtttgactctttgcacccacagtcccatgatgtgtgtacttgtatgtatatatattcacatctgaggactgacatcatttcgcagaccgggaaactaagtgtgaggagtacattttaaaataatttttacattatatattggcagatcatccatgtgcttgtagaaggtattatattggtaagctgcaggtagacaggaagactgaaagagaaggtagaacctgcttggatcccagtctgtgcatacctaaggagttgagttggcaattcctgaaccaaaggttctggtgttcagaaatatctccagttattcagaaggatggcatgacattctaaaaataagaaattatttgtagtcacatcagtgtgtaatataccttacagaatattagaagggagatgaagcatttggggattcaaaggaactagttgtagacccttaggtatggccctgagactacctagggtggcttttgtagcaatctaaacctgtatcctgggatgttagcatctctgaacaaaccttttctctcccctccattgagatcactttctttaaagtctttatgcatttagagagttgctgaggcaaggccatgtcctggtttgctctttttaaaatgcagatgtttctagaaatgactataaactgagtcctgagccacctcttgtaacttttcaggtcttggtctgggggaagataaagaaatggaggtcttatgcttcacaatttggtttaagtcaactatggcaaggtatcttgacttaaataagtgtgacttaagtaagtctgacaatttaaatattagaatggtaagacatttttgtgcctctatagccatatgtccatcttggggaggaaaaactgaaaataaacgatgattacttttcagtattctgtggaaatcttacttctctttttagttaatttttcagtggataggctccctacctgccagccctaaattcttatttattcctgaaactctggtttttttcttttttcttttttttttttaaagtattctgaaactgttttctgaccatgcttcatatattgaagtagatttttttcacagaagggtaaaggaagtgcattatgtttcatatgtagatgcttttcaagaacacacagcttctcatcattcattttaacagtggacaattttggtgcctgtttatggagattccttgggaattatcagctgatagaaaatttctgaagagagatagaaaatctaatctatttggatgtcttgttaaatggagctttttgagtataagggtttctgaagaaatataggctgtcagagctgatagagtttagagagtctctgtgtaccattctttataaataaagacagccaaaagcccagagaagtgaggtgcttgatgttaagatttagttagtggccccctactggtctctgagctgcccatcactctaccttgactaatagtgataactgatgtttctggcaacaaatccaaggtacaagttttccagggtcttcaaaggaaagctacattatattaaagttcatgctgaatatcttttattgtgttctgatagtttgaaaattggttatttttgtactgttgtaaaactatagtgcttaactggaaaccccagcattaacccagcctttgccagcgtttcccttctataggatgagaaagttgttgaagagtgaggaaaaaagatggtatcttgtccttaacaaaaggtctacgtggatgaaaggagaaactgacacttattgttagggaaatggtaatgcttacatgatgatctaatctgggtttgagtttcgtttttgaagtcaccagtttttattttggtgtttttcagatattcttatagccttcctggggagatttattttttggagacatcgctcacattgtttactcctctaggttaaatgtactaggccatctgttgttaattttgtagttgtattaaattccatcctttggctggattttaagcaccaaaagcaaacttagacagaagcaggagcatttgcaaattacatagctttgagcctaaatggtggtttttataagtgcagttttcaaatgggctgagattctattttgagttttgggatcagtaatttaaacacagggacctctacgagttctctggaaaagcccattttgagaccctgaacagttgttatgccaaagcaagctcttggggtaaggttggcagtgatgctgctgataaattacttttaagatgcttggggctgaaggacaatgattttgtaatagtgttttaagttctcaggctgacctatgaaatctggaagtgctcatctgaaaggccagtattctttctgacaggcacaggaaaaactcgtcccctgcttgatcctcatgcaagcatttcttggaggaagccaggcctgtgggtcttgggggccagaacagagacactgagagcaacactactggcattttgaatttctgctgaggctgcaaaaacatttcaagggaaatctgaagttatcccttcactgtctacagcctcttgaattgacttctgggtgttacagatgggaccagcgtgtgtaaaagcagaatttatattctatttggatatcagaatcaagtttctctttttaaaataattttatggtaagtcgtggtttctctgatatgatttctgttgtgagcggaacaaaaatcatggcgaaatggtgttattacttaaccaaattgcctcgtgtacagacaggctgaactggtgctttgcctagagttggcctggagttttcagaaactcaattgtggcctttataaggctgtgcctggggttgtatttccaatctctctcaacttttgttcttgtggaagggaggaagtagagctgtgacagatatattgccagatagcacacaatagcacacaaaacgagaaagacacggcgtgagccattcatggagacagatttacgctctgtgctgccctcaaaccatagatccatctatttcagagaaacaacttgcccactgtattatatttcagacagggacatggcttagaagagagatgctgactccttctgtttagcttttgccgataatgctgcacgttttgctgtagaattacttttgtggggatgggaaagtatgtttggcaaaggaaggcctgtctctagattggaagtggaagaagggagatatcaggagagtaattggccatgctgtcgccatagtgaagtatatgtgtatatttttgctgggttttgtttccagccaactatattatcaggtgttggattttttaaacttacttcacaataagaaaaacaaagctagagagattgtgactggccaaggccagaatgtttggcattcgtagtttctctttagttctctctgtaggaccatttcctggagttacagaagaattgaccagtgtgtcagtgtctttcatgtacattaatgggcgatagtattggtagtggttaatataatagcatgggttctggaaccagtctgccaggatttacattcaggctcaacaatgccttagctacatgcctcagttatcttacctataaaatggggattccaggtcttaccttataaggcagctctgagaattgtttagttaatattgaggcagttataactaagtgttcagtaaacttagctattgcattttaaaatttgtgttgattttatggaaataaatgatgatgtgtgatacctggtagattgttcggcagacatttcaaatgtaaaaaaataactctgtctgcattgaaatctttctagattgatagttttaaataatgaaaaaaatacttctgggaatgatctacatttggaagaaatcaggaaagagaagactgtgtgtacttttgcatttctatgttttgggcttgtaagatatgtgattgtatatttcatgtcagtaataatttattttggggagtagaagcaaatgtcagttacatacatcatctatggaatagatttttagttttatttattttaactggatgaaatggttgagtgttgccttacttggttgaatttagacatttgagaaaatttttttttaacttttgtgacacacaaggacctttgaatgaaatcagtccccttttcttcctttaaaaaaacttataagaattaccatttcttgactaaacagttgttttcttttaacattatatacttgtctctacatagatactacattttttagttagatgtgttttggaagagcattgactttttttcctgttacattggaaaaatttaatggcacgtgtatgttattcttatcatgaagtgggtttaggcatgctgccttatactaaatagaaatcctatagtagttgtttttcagaagtaatccattgattcaagtcattcattgattcatttatgaatacttaagtatggttacataggtagggattgtcagaattggcttttgagcattttgtttagcagttataatccaggtggcaaatatactgtctgattcaattacttgcatgaaatcactttaaacagctacttaagatgagttgtccctaggcctgtctttatctacttattgtgcatgtgtgctagcatacacgcattatcattgttgttttttattgtgttaaaaaaatattacaaagtgtaccatcttaaccattttaaagtgtagatacttcagtagtgttaagtatagtcatttcattgtgaaacagagctccagaaatttttcatcttgtgaatatgaaactctataccccttaaacaacaactcccctcccttgttccctccagcccctggtaagcaccattctcatttctctttctatgaatctgagtattttattttattttttattttttgagacgggctctctgtgttgctcaggctggagtgcagtggtatggtttcggctcactgcagcatccatcccccaggttcaagtgattctcctgcctcaccctcctgagtagctgggattacgggctcgcgccaccatacccagctaatttttgtatttttagtagagacagggtttcaccatattggccaggctggccttgaactcctgacctcaagtaatccgccagcctcagcctcccaaagtgctgggattacaggcatgaaccaccacacccagctgaatttgagtattttagatacctcatctaaatggaattacatagtatttgtctttttgtgactgacttatttcacttagcacaatgtcttcaaagttcatgtaccatatgacagaattttctttcttaagactgaatactgttccattgaatgtatataccacatttgtttatctccttatcctgtgatggacatttgagttgttttcacctcttggctattgtgaattagtgcttctatgaacacgagtgtgcaaatttctcttcaagatcctgctatcacttcttctgcatatgtacctggaagtgtgggattgctggatcatatggcagttttatttttaatttttgaggaacctctgtactgctttctataggagtcataccattttgcagtgtcaccaacagtgcacatgttccccagtcttttaaacagccccttccagactgacagagtggctacatacagaacagggcagctttgaagattagggtggcctgttccaagcttcttcagactcctcgggactggctaattatttttgttaaggtcatactgctggaccagggcctataggttggcactgacttacgcatagaatgttggcctgggtgttgatagacttaggctgcaattgctatgagtgatcttaggcaagttacctccactctgttccctgccattgtcatctgtagatgaggtggttatgcttctctctatttcttaatttgttccaaaatcttattgtttgttgtagaatccaggcatctaaaaaatatactgtgtgtagcttcgtgtaattatttgatagactggatttctttttgcaccagatagttcggtttttttgttaaatgtctcctttttcttttcttactctttaactgccccaaatactaagtgacgaggatggagaccttggcaattgagtgctatcagtgagtctgaatgcctgggttcaaatcctccatttactagatgtgtgaccttggagaatgtaacaaactgttgtttcacagtttctccatctgtgaaatggaaataataatacgtttgtgagacttaggtgagttaatgcctgtaaagtgctttgcatgtgtctagcccatagtaagcactcattaaactcttaattatcatataatatgctaattatgatggtggtaaatgagtgaggtcatcttccattttggtcatactccacatttgggtagctttagactttctgaagatactatttcctgtaatgtttctttgtaggtggggaggatatacctattacacagttagaaaaactgaacagtagagattatgctttatatggctgggattaaaacttcagtgtcgtgtttagagcctagtacttcctggcctggcatgttgtcctacacttaatgactgtggggcctgagtgggttctaatgttagaatctggtaagaactcttcctgacctctttgcccatttataaacagccttccagggtgacctgagtaagatcattttctagctgtgtaatcctggtggtatgaaaacactggatgtctatagttttttagaactgtgacttagtactaatactagcctcttcaatactcatactcttaaggcttaatatttgtctctttattgatttacatatttgaaacctagacagtcttttcaaaggtgagtagatattttatatgtctgccttctggtcggtagcagcagttgtgcagttactcagctgttggcagttctgttacttaatacagaggcagagagcgaaagacttattcagaaacaaaacctctgcttgaaaagttctcaaggccagccatggtggttcggcctgcagtcccaagctggtgtggcctgcagtcccagcactttgggaggctgaggtgggaggatcacttgatcccaagagtttgaggctgtagtgagccattgatatggctccgttgtctggagaaacacccagggtctctggtctcgtgctgagaaaatcagcaacatagatacacatggagtggtttaaggagcggaaagtttaataggcaagaaagaagaaaacagctccaccgtacagagggaagagggctcagaacggaaaacccccattgctggggggaatgccgtaggttatattgggaggctggatgaggcggtatctgatttgtatagggcccaggggattggtttgaccaggcttgtcattcacatagcccatgaaaaactggccctcctatcctagtcttttaatatgcaaacgcagctacctggctggttgccatgatgtcctgcccacatagtctctacctggctggtcgccatgatgtcctgcacacgtggcaacaaaaagtggcaggaaccgccatactgggtggacctggcttttagttgcctgcatttgcatatcaatgcttgcaggtctggtttttcagtctgctttctgttagaaaagaaatgttttgggggctgctttttcagtaaaagaaaaagcctcaccgaggactcttttaccctctctatctgcttaaaataattcttaataactcctgtaataccatgattgtgccactgcactccagcctgtgtgacagagcaaaaactatgaccctgtgtctaaaaaacccccaaaaacccaaaaccaaaaaacgagactgggcgcaatggctcacacctgtaatcccagcactttgggaggctgaggcgggtggatcacttgaggccaggagttcaagatcagcctggcctgttacatagtgaaaccctgtctctactaaaaaaaaaaccaaaaaacaaaaattggtctggcatggtagtacacgcctataatcccagccacttgggaggctgaggtaggagaatcacttgaacctgggaggtggaggttgcagtgagccgagattgtgccactgcacttcagcctgggcagtagagttaatgagactccgtgtcaaaaaacaaaaaacaaaacaaatgttctcaagtcatgttcaagagataatggcggacataatggaacctccctaaatctgattttctccagctataaaatgaagggcccagatcaggggatgcttaagggctttgcaagttctaagactcagccatcttgagattggaaacagccctgtaggttcttagggcatgatgaagacctttgaggagaagtattttaacagctttgtgtcttggggaggaagagtcatggggaggtgattaggtgggcattaaaggagcaactggagaaaggagagactaggaggctgttttgataatccacatgtgaggtagactgccccttcctgagtgcctgaggggcacttgcaccttgggacagggtcaaggttttctctgagatagcagctcccacaggcctaggagccttctttcatgagcttgctgccctggttcatgagggagggattgatggatctctgccccgttctgtttttttgctagcactgtcttcacaccctgttgccgtttatgttttttgatgaatgattaattagaaaaataatcatttgtaaattgtgagtgaaccagacatttggccctgactgtagggaaatggcgcctctgagccgggtgtagcttgcagccagtacatcagagctccagtattcccagaccagtgatgaatttacatgaagttccttttcagcatgttaatgactgttacagctgagtaactagcgaaaaataatagcaaatgggaagagtaaatatttaatgcttttatatcttttagcttactgtggaatatgtattttgatttaggaaggacatgagagtcttagagacattagagacaatgttagtgtgtctgagcctcattccttgtttccttttctttctttgcacttaattaaattaaaaggataaagtgagttgttgtgagatggattttactaggggagtggtttttctgtaagttttaggtcacaagatgcgtctttcctggcagttaaaatctgtatgttcagactacctcattgattacgtgcctggtgtgtacagggactcatattgtttctaaaattcagctttcatcattttactctcctgcttaaaaactttagtgactccacaccgcttctgggctgaaagatatactcagtagcctggcttttaagggagggcctctgtgctgtgagtccagcctcttttcaggctctctccctaaggcagctccatgtggctacattgctcaagccacagtggttgactccctgttcctgtaacttgctggaggcttcctcacctttgcacctctgctcagatcattttggggcatgaaatgatcttgtctttttctctatctaaagcctgcttttcctccaaggctcagttctagacgtttctgtgactactctgactggataggagcctgttcattttggaatatagagaaaattgaaagtaggtcacagttctctattccttccagtttgccacctctctaccacagacaattaataatgaaccctacttttccccacttcctgtttggccaccatctagtcttagacaaactaagctatttgtccaggtaaacaagtagttgtggactacagaaatttctgaagattagaattgaagttagtagggaaacaggcctcaaggatagtgccatattttctgagagcagatgattttcagacaaaaggttttaccaacagcattcatataaagtactgctttagtctgagtttgcaatggtagaagtagagtatctaaagaaaggatccatgccctttttttttttttttttaaatagagacaatgtctcactatgttgctcaggctggtctggaattcctgagctcaagtgatcctcctaaagtgctagaattacaggcatgagccaccacacatggccaatccatgcctttttactctgttgtagagactgtcttggagtgttgagttcagacccagataaaacaataatctttagaggaaatgaccaagatgaccagaggtaggtctgaaaacatgaaggccgtgtgggtaagagagaacaagggagtccatgccttctgttttcaaatatttaggaggctactgtcaggaaggagggatattagacttcatgtatggaaccatggagtgagaacaaagattgctgggtgtaggttataccaaagataaattttatgccaatataagaaataattttctcatagtgctgtgataaaatgaatttccccaggagatagtttcccaagtaggaagggatatgaacaacaggagctgatatttgaatcgtgaatatacgtggccttatagtaaaaggaccacagatactcgaatgtcagacctttaggaacaagtcattttctactgtaggattttggagggttcataatagaaagtaacacatctccttgtgtctaaaaataggaataaatcctaatatgaaccaaaaaatatattaggtacagttttctgagttgatattgaaatgatgaaaaagaaagagatctgggactgggggttcttaacacactgggtttagggacctcaagaatattgtttaagaatgacgagagatttgcaatttccaaggagtcataagcagtttcaaaaagttgaatgtttttgaggaacttaaaattctgttgttttcaaaatactatagaaaagtaatattacaaaattgtcttgacataagtaatttgggtatgctgtataaaggcttctaagaattaagaaacatggcccgggttgcaaattttaatgcatgactacctttttttctatagaatatagcttttgtcagattctcagcagtggctctgatccagaaaacattaagaaccactggtcatgagtggtgattttcagcttttttggtcttaacccacttaggtgggacagaagctccttatctcacctataccatccagcatcaagataagcacacgttaatatgaaccatatacatattttgttttataaaagtatcccataagctttaaaaatgtaattttgtcatacttaccttggtatagtagattgtaagttatttagagactataaagtcacagatgaatgtttacaagtactctttttggagttgggcttattctatctatgtcttctttagcagtggggatttggattattcttaaccataacacatacaagtctcattattggaaaattacaggacagaaacaaatgctgtaaatatgcaccactgcgcatcatgagattaaacagacaattttcaaaaagtcaaatttctaatgataaaattaaagtaagtaatttatatttaaaaagcaggaatagcagcaatgcaaactgtgattgacttaagaccacagtgaggttacagtgataataaatcattcttctggagaattgtgagaattttctaactgttggtgtgtgtaagtgcaaggtaggcactttgcataattgtatagtagctgacattcttgatatgccagtttcaagtcctttatatactttgctaacttgctgatattaatttattaatacaggtttttaggactcccctctcttatctaaggtaactagcttattaaagctcatattaaagaaaacaagtatctgtggaaatgttcttgtgggtaccagtgattctagagccttacgttaagaaacactagtctaatggatcaatgtataggtaaatgatattagacattttgagtaggattaagatccaggagactatctgaataatgacctttctctctctttctttttaaaatatggtcatcctaacgcgtatgataacccagatactctttctttttaaatacccttttatttaccaaccctcttaaacctggccctgaagttaagatcaacagctatgtgtgaataatttttttccttctcctttgctttgcttttcctatcaaattgaaataccctgccactttcttccctctctgaaaacacaaaagaggattaagccatataatggactatttatgtgtcaaattaaacgttttactctgaggctgtttctgagttatgcgagcagtaaaaatatgtattaagctgccaagccttttaaaaaatgcatgttatttagctgatagcctgtaacagtctgatggacccataatggtgttttgagtaaatacgcatttgaacaatttatgaaacttatgtttacatgtgtattaaacagcctgggtagggagtgaccaaaagttattaccagttgacagctgttgtctggtgaccaatttgaaatgaattggtggattcccttcagtgcggagtaaacaggtttcccagtcaggggagcatgctgaataattatcagtgtgtggggcctcagccctggaggcctgtgtgttggttgaatgaggtgctggaataaaatgtctcaactctacagtgaagttgcaccttagattcacatttatgatctagtttattttgtacttggaaatttataattatgttcacagagtacaggctgtgcataacaatatattctgcccttgggaagagggttcatgtttgtttatttcctttttttcttttttaactgacatataatcgtacatatttatggggtacatagtgatgttcaatacatacaatgtatagtgatcagatcagggtaattagcattccatcatctcaaacatttatcatttctttttgttgggtgcatttagtattttccttctagctatttgacaatacgtaatatattattgttaactatagtcatcttccagtgctatagaacactataatagaacttactcctatttagctgtagttttgtatcctttaacagagctctccctatcttccccacacccccttgtttatttctttgacattatccatctagggaaatgatcttgaaatttttatgatgtgtccatatcaacaatacatattttatatttgttcacttcaaaattatatgcatatttacatgtgtaaattttattccaaaattaggagtttaaaggattgagataaaaattaattacatatagataatttgattttctttttgtacctgaatgaatcctctttggcactgtctgggatgtgcagattttgccttggagattaaggcgagtgtcttgaaacctttgtgtaatgaaaagggcattgtggattatagtcattcataaacctgggcaaatcattcagctaccttgaggtctagtttcctcatttgtagaatatggatccctgcctggggggtttcataaagactactgatagtaaatgtcaggtgtctaccttgaccacaaaatcacttcctcagagaggctttccctgacctcttttctccatgatagctcctcttttcttcctgatcactctctaactccttaccttttaattaattaattaattaatttttttttttttttttttttttttgagacggagtctctctctgtcgcctaggctggagtgcagtggcgcgatcttggcttaatgcaacttccacctcctgggttcaagcgattcttctgcctcagctttccgagtagctgggactacaggtgcgtgccaccatgcccagctaatttttgtagagacagggtttcaccgtattggccaggctggtcttgaactcctgacctcgtgatctgcctgccttggcctcctgaagtgctgggattacaggcgtgagccaccgcacccggccttttatttatttatttatttatttatttatttatttatttatttatttatttatttgagacagagtctctctctgtcggccaggctggagtgtagtggcatgatcttgactcactgcaacctctatctcccaggctcaagtaattctcctgcctcagcctcccgagtagctaggattacaggcatgtgccaccatgcccggcttaattttgtatttttttttttttttcagtagagatggggtttcaccatgtcggtcggccaggctggtcttgaactcctgacctcaggtaatctgcctgccttggcctcccaaagtgctgggattataggcgtgagccactgcgcccggccaactccttacttctatttaaaacaactttttaccatctgaatgaatattatttaagtttctactggattgtaagctttgtaaggggagatatttttaaaattttacttttttggtctgttactgctgtatccataactcctagaatagcatgtgcatggcacatagtaggtactcagtaaatattagtcatgatttgaatatttcataacttagtagttgactaataaatagaggctgttactgttttcatggagtatcctacatataatatagttggtgttctaggatagaagacataattctctatgtatgaattgctctcactgtcacaggatccttagggtgtcacttttccagctggaaacctctgtggcctatggtgcctttgcccaagttttgctccggcctgctgggcttgttccacccactcagctgggcaggctgtgctcaggttttgctgccggcctgaatcccatgcctgccaagtgtgagcaggcgcagagcggcaaggggtgtgtgagcaagtgcagggtccggccactggcacagccaggcatgctggctgtggggtgggcagctccatatgaggctgtggctggaccaggtgtactgcaagcagcttccactgtgggcactggggaatgcggtggcacctggaagcttggagactccaggaaccacagaaccccaaacagggtgtcacagtcctggcttgtagagccactaggtttgggcttcctgaagggctgcaactcttctctctttctcgtcacctgcaatgtggctattgggggttgtgttacacccctttcagtcccgcaattcagcgggtgctgagttttgtcctgcatccaggaagaatgagatacgtggacaaccagagggtgagcaaggcggagaggggcttcatttaagtgacagaagagctcttaggagatcagaagtgggtagctcccttccacagcaggtcatcctgacgagtttccagctgtcagcagagaggagacccatagtgggtaagtgctttccatagtcaggttgtcctgacaagttgaggagacccaaagtgggtatctccttcctgcagctggtagtcctgacatctgcctgagtctacctgagtccgagggtttttatgggctcggaagggaggaagtatgtgctgattggtccatgggtggccatgagtgggcctggagaaagcaccgtaagttcttattccaagccacggactccagctggaactggcagcctggcccctaggcttcaggccatccctggcttgaagttggggtttcacaggggacctacccctttccgcccaggaacctgtctgcctcccaccgtcaacaagctgtccattgtgtctaggctgtttgtgcagagaggggtgtctgcagacccatgccaagctaccctcagcacccacccccatcctccacttccctcctgcacctgtttgcagccaaagtccagagggggccgaggtggcagagggctggtgtgtcaacatcacctgagctactgtacacctgactgggtcgcggcagtgcccagtctcagccacaactttgctctgcaccagagcaggtgccgggagtggggagaggccagggagtgggagcatgtacttccaagcctatgggagttgggcccccgagaacacagggatgcctgggtccagagccacagctgggcagctgcagctgtgcccaggagtgcagggctcccaccctgctaactcggtatggggtggggctcctgtcttttcctggctgtgcctcccctgctgcagcatgggccgctgctgccatcatcagtgggacccaaggcaggaagtgttttttcctgtagggaggatagatttttttttgtctcttacaggtagcatctggcaggcatgtagaagttagacatgaagcctccacccatggatctgagccaagtagactgacctgtgtaagcttcagatgcctcagtcttggtctccttagctccctgtttttgtcaactgtgccatccagctgagcaccttagagcttgaagctgagagcttcagcggggccagtgcctacaagggctgtgtgtatatgctttagaggtgggagaattgtgctgccagtgggcgtttggcccactaaggagaacacctgtgacctctgcaatcttccctacccctggcattccaagtgccattccaagtctgtagagataatagaacaaacgtaattttttgtgtggttggcaacgaagactggaggagaataaccacacctttggaagacttcggtggtcctttgaaatgaggagtttttatagaaacacttatcattttaaagacctaccatttttaaggtcactcttctgctagggctgtgaaatacagacatatgaaatgttttccagtgttgctctggtacttacgtgtgtgatgattttattggagaaatggatgaatatgaggttggagagtctttacatgtatgaactatcaaatatacagttcagtagcctgaaaacattaacaaatagcttttatttattgtatccttatgtctttcaatttggttcttatctgttgtctcttcagttgatgcaaatttgtgctcaacttttcctgaggggaaatggagagatactttcttggattagcttatgatcttgaacttgactattttaaagagtcatggtatataccaatctggattgtgtttaggatggggcttgggggatggtttctttgttctcttttggcccacgtcttctaacaacccatttgtttagggggttttatgctgcttagagtgagctgagaatgtgctcaagcacataattttagcctgtttttcaggtttacatgaaaaatgtaacaggcttctgaaacccctctaggttccagctttcaagaggctggtcaggaatgcactgaccgagagacttccctcaaaattaatttataaacacgctagaactttcctcaccttaattttgagaaaaagatctctctcatggcattttcaagtgttatggtagatggaaataatgaggaaactgtggcaccttgaacagagtgagaggtttagagttgtatagaccttagtacaaattttgactctgtcattaattacctgttctgtcatgagtgagttacttaacattccctgagcctcagtttcagcatctgtacagtgaggattctatttatttcatactgttgtggagacttgagcaacagagtgtgaaaacatctgtcagcgcctggtgtattttggacattctgtaaatcttagcagcccatttccccattctgggggtaaagccacaggacttttttggcaaatagttgagatacttggtgccaaaaggaaatttaactcatgccatgacaagtttttttgtataaggatgggattctggaaacatgataattttttctcttggccatatggattagcaaaggctttagaaaactacaaaaaagactaatttgttgcctctggatgtgtgtgttattttgggctgttaatatacttgactgcttgtttcaaggactggaaccttttcttttacctttaagattcctgcattttcatgtgctcattcagctgggatttgtgtttcatagaactggtagtattggaggtagaggagatactgtgatatcatatctctctctctgtctgtctctctctctctctcccactgaagaagagaagacaaaatttagagaatttgagacttgctcaaagttgtgtagctagttagcgataaagctggaattgcaccagatttgatttccatgacattgctttagcctggtggttctcaaagcatggttattggaccagcagcatcccttgggaatttgttagatatgcaaattcatgagatccccattcccttatcagaaattttaatacgctgtgtagggtgattctaatgcctgctaaaacttgggaaccactactgtggtctttacactattgggcagggagatgggagactacaggtagatttgctgaatttcatgggcaacactaggttttcattttaccttattgttctgccatttagatgtctcctcttaaaacatttttacttgcagtgatggcttccttagactcgtgtgtgattgttgctggggcagttaggtggaactaataggtgttgcttgttgattccctgctaccaagtactagttttgaaatttgagtattcattaaaaacaaatagggatttctgtgtctcactcctggaaattctgactcagtgggggtaaggattaggaatgtttaatttttgaaagccctgcaggtaattttttttctactttttaaaaattataatttttattttctttactgttcttttaagacatcctgttatagcatctgcaggtgattttgatgcccagccatgtttggggaaaaaagtttgggttctgagtgaaaatagaaaacgtaatgacatggaaaggaagtcaggggataagaaaagctctatggccagccatggtggctcacacctgtaatcccagcactttgggaggctgagatgggcagatggcttgggctcacgagtttgagaccagcctaggcaacatggcaaaaccatgttcctattcaggaacaaagaatagatcacaaattaaactctgtgggttttcataagtggaaagttggctttcgttgttctgtatttgggtgcttagtggacaggagttatctaaaagaagtaattatagttgtaatgcggaccctcaaagttgaaagtagattgaaatccattattttacaaggtggccttactatttatagtttgactgtaggtatggcagtgagagataaaattactttttctagctttgcaaaacgccaaacgtctttgaaattaagagtaaaaggggtttaaaatatgtactgctttataaagcaggaaaaccccactggaacattttgggtgtttacagaaatgggtattccatgggagagaacgtggtaacctatgttttgtcatcatttgtttaatcactgaaaatatattaacaggccaggcatggtagctcatgcctgtaatcccagcgctttggcaggctgaggtgggaggattgcttgagcccaggagtttgagatcagcttgggaaacacagtgagactccatttctacaaaaaaagaaaaaagaaaaaaaagtcacatgtggtggcacacccctgtggtcccagctactttggaggctaaggtgggaggatagctcgagccccagagatcaaggccgccgtgaactgtgatcgcaccactgcactccaggctgagcaacagatcaagactcttgtataaaaaagaaaaaaaatttttttaaaaatataaatatagattaacaaagtaacagggaatataatattttcaggttggtcatatagaggaaatactatattgtgttattcagcttaataaaatataaaacaaaaaaattattaactgtttgaaaaattgtagtcagatatttgattaggggtaggtcctgatttggatgaatttgaatcacattcgactaaatattgtgctttttaatactcactttaaaaacaaaattaattgggcaaatgttcatatccattttaaaaaactatcctcttaaaactagattgatagtagacattaataggcttgatgttgtttataatattttgctatattttaagagcatgcttttgtatattttctgttttagtgaagcattttaaaaatgcccccctcccacaactgcaggaataaatctaacagattttgaccaaaattactctaattttgaatttcttgaaactgggtatggaaactagacattaaaaaaaatctttatttttaagcacggtttcttggtcagtagcttctgtattacgggagaacacaagaaggggccttcttgacactcaagaaatgctctttttccatctacaaataggaagacaccctttgtggtatttttgttttgtgggccctgaatgaaaacgtattatgatcagttttaaaaattgctgcccctttaatatctgaatatattcgtggctagtgaagcacatgcatctgtcagatcatgggtgagaattcacttttctttttgcgatttctccagccacaaggacaaatttagttttgcagagcagtttgacacctctagaagcctgcggttagcctcggtgcacctctagcagctgcataggctcaagaggacctctgttcttccctttttggtttggttaccttacccctcctcagggaaaggccaagagactcagcacttcctccccaagtgagtttccttagtaacgtcagccttctctaatgctggccaagggtgtctttgctgggctgttttccctccaaaatagactcactggggtatagaattttttttttacgtgaagggtatagaattattttcagaatagcagcagggtaattaggctcattgttgacatgtcattgaagtctccatgtgacaaaattgctcctccctctttgagcactctgaatactcttaccctcttatctcgatctgctctttagaaataccagcagataatctgggagaaggccaccatagccatgcacagagtggggagaatgaggagatctttgctgaatgtcttttagttgtttgagttggagataaatgcagaatgacctccattttgccctaagaacctgaccttcttgtcactttgtgtaacattaattttctaatgtgttctggtcaatttgtaaaaagattttttttctagtgtctcagctgttggtttgacttttgtattttcattggtaaaatatgtatgtctttgctgtgagcagagagaaacagattaataaaaaccactgaaccagcattgcatatgtaattaattaacaccaccaggaaagctggttcatggttgtgtgtaaacttatttccaaacatctaaaaaacgtttagagttatcttattcagttgtctcacttctaagggataggttaggaagctgtaacgtatgtgtatgcacagaaactgttggacaatgattctcaaactttacttttcattaaaatcgtctggagggcttattaaaatgtagattgctagacctcatccatagtttctgattcagtatgcctgggtggggccttaaaatttgcatttctcatgtggccccaggcattgctgatgctactagtccaaggaccttactctgagaatcagttttaggatgtagatcttatgttcctctttgccaagggcaaatgaactgaattgtataggcttccttttcttttacaagaagcattgcctcttctaagtagacatccaccaaatatttatgtactgtatccatggtgccatgcactgagctaggtgcactggggataaataaaatgatctctgccttggggaactcacagttgagagaggattaaattaagaaacccaccaatcgtgattcaatatgagaagtgctgtggtgatgtcaggggtaggctttctagatttgctatgaggtgcagtctgagctttttctcagactgtcttagctttatacctacagaaataagtgaaagaaaatgaatcttctgcagcttaggattttgttagtgctcagatcagtttcctctcgtccttgactttgggcatcccaagctctgtattcagacactcctgaactggcattgtgagctctccaccccagcttttgtggaagagtccttcctccatttttaaattacaatttcagacactgtccactgtggcagcaggatttgtaacaagaccaagttaagtgatcttggctgaactgatttatgagacagcttcaaaaattcatgaggtaccatgggaactttctgtagtggatcagcatgccgcttttccttcacttcttcaagtagatcagacattttgtgataacacggcagtttatagtggagccttctagattatggctctgctgattaagacactaagacagacctgaagacaaagagaagggagaacaggatgttacttttagaaactcctgttatcctaagcttgagcagggactttgggtaaaatacatctatgtataactcaatttatacatagaactctctagggcaagtttttctccagtggtgatctgatatggagtgtcttggccattaataatggtcccataattttaagcacaataaaatgttaggtgtgtatatgcgaaaaattgagtgacatagtagttgtctctcctctctttgtgaaaaccggtagacaggaacgaaggatgtggccaaaaccagtgacaggttatggtgctttccctattttattgattgctcatttctagtctctaaccttatttgctacttattgatctagtagaaaagcaaataattttccctagatagtattttgttgagctgggctttgatgacttgtctaccaaagggtttttaaaaagtacttacctgctgagtggcagcctgtctaccatttaatgttattatctgtgagcctgggggttccttcttagtaggatcactgatgtcataggctgcctctttattctgcctactttcctgcaagataccacacatgcccgtggtctgctttaatggcctcacagtgcacacagccttagacttaacacaagaaacatatgagtgatcccattggagataatgtgttgccgagtcaatttgggtcagcatctgccaacatgtcaaattttcacactaggttgtattttgagatttttattcatgcttttgggttcaaatttactcacaaataagttttgaacttttaagtgctaaaactgctgagttcttgactatctgcacttggggaggggaaggttaaagataaggggtgggtatgtatgggaaggaaacagtagcacagatcatctaacataggaggtaagatagatttcccaatgtcatatataactttgactatatattttttcctatgtttacattctcctgtttatgattatactcttttggttcatattaaattggtgtttatctcctaggaatatatatggcgaggtgtgtcataggaagcaatagaaaaagaatttggagactggtcacttataattcttgaataatataactatgtagagttaaaagcaaagattgatcctgtcattcatgggattgatgggcatttttgctggtatcttattattgttcatttctgagtaggtaatatattaatatgatcccaaaagcaaaattgtattaagaagtatatagaggaatgtctcactctcatccctggacctatgtgccccattcttcaggcttttataactactttattagtctctattacatcttttgtaatttcttaaatagtgtgtgtactctcctatttgtgtatgctctcgctttttctgccctttgttataccatatttagcatactataagcactgttctgcatcttgctgttttgtagttaccaatatatcttggagatcattccatctcactacagagagagcttccgtattcctttttatagctgcttaatatttcattgtatagctgtaccataatttacttaacctgtctgacactttggttatttacaatcttttgctcttacaagtgatgctgcagtgataatgttttttttttttttttttttttcccgagacagaatctcactcttgcccaggctggggtgcagtggcacaatctcggctcactgcaacctctgcctctcaggttcaagcaattcttctgcctcagcctcctgaatagctggaattacaggtgcccgccgccacacctggctaatttttgtatatttagtaaagacggggtttcgccatgttgtccaggcttgtctcagactcctgacctcaagtgatctgcccgcctcggcctcccaaagtgctgggattacaggcatacagtgaataatcttgatcatatggcatttcatcctgggtgtgtgttcagttgtaggataaattcccagaagtgaaattgttacagtgaatgtgcatttgtaattttgatagtcactgctaaatccctctgtagaggtcgtactaatttatattcccatctgtttaagagtagagatttccccgcagtcttgtcaacagggtggtggtgttaaacttttgaatttttgccaatctgataggagaaaattggtatctcaaagtggtttcaatttgcatttcttattatgagtaatgttgagcattatttactatgtccaagatctgatagtatttccttttgtgtcatcaacagtctggttatatttctttcctgttttttctatttgattattgctatttttttttaatttttaaaataagctattttggaatacttatagacttaccaaaaagttgcaaagattacggggattttttttttcttttcttatgccctcattagctcgttaattgggttagatggtttgaggaaggacaggtctcctggaattctgtggcttgtcataggtttgtcagcccaaataaggatgcacatccaattcacgactcctggctgcctctggggattttccatatggagtgacagacttgggaaattctgctgagcttctgactagcctccattatgaggcatataattcagagcccatcttccattattcttcttttactagtatcaattattaactagaaaggttattgaagtgaaaaccttgcctcaagtttgtatttcttgagatttacttccaataataaatgtggttttcaagtgactgaatctttcatagaccaagtttcgagcacattaaatatttggtggttttgcgtcctctctgcctcacatgctaattgagaggatgagtagctataatttttctggagcttcaggctgtcattctgtcctgttaattggttcttggagtaaggagctaaaatgtggaggcagaaatgctttcccagatagaaacatgccttgaagctttgtgtcctgtaagggtccacatagcctggaagttaagaatactggctctggaataaaaccttgtggattcagattcctgctttgccactgctagatgtatcacctcggacaagttacctaacctctttgtacctcactctctccctgtttataaaatagggattagaacagtacctgcctcatctagtagttgtgaagattaaatgtgatgagacatgtaaagtgcttggtacaggcctagaacattgtaagtgctcaataaatactggccgaaaagtcgtacagggcagtggtttcagaggccatgcaataaaatagtgggttatgttgcatttgacttttgttgattaacctttcttcttcctctattctttaccttgtgaggcacttaacctactaactgaaatgccattcattcagccagtatttgagtgctcagcaagtgccagactctaaacaagatgatgtgtaagatgctgcaaggagccctcgtgccttgcagcctgagcacaagtgcctataaacgcaaggctggttgtcgtcattgccatccccagtatactttgagaatacaaaagaatgtgaggtcactctcctttgactggggtgacgaggacatgcattgtgaaagggggaactgttagaactgggagccattcgtaagtgaaataaggataagagggatattatcagcattgatgctaattagcatttctgtagcattttgcagtttgggaaacattttatgtattttattttatctcagtctcataaaagagcttgaggtattattatctccagtttacgactgaagagatggggagtcaaataggttatctgattctcccaatgccatacagctccttggtggtggagttggggtttgagtccaggtctcctgactctgaatctccacgtgcttccctctggtctcttgagtgaaataacccgtactagcaagaaagagaagagtatgtcggcaaaagagaaacctggaatagttgccaattgtccctaggttcagatcacatacttctagggcatcagagctagaaggaacatgagatcagtgcatcctctttatttgactaatgaaaacattgatgtgcttgtgagggacttcgagaggtcaatgtggtgctggaagcagctcaatggagagggtagacagttccccttggatgctcatgtgtggtcttctggggattgattagttgctggtaaggaaggagctcattttggggaaagtaggtacatagattcatagagggaaaacctttattcagaagcaggcagtttttctgcaatatcttcctgggaaacacaaataaaagggctgtagtttagtattcagatgtggttctggttgtgcaaggataaggagaaaaggcagaggcagggtgagaaggaaggaaaatgaatgactgatttgaaaggtcagtgagaagtctgtgaaaggtacatacttagggtctgtagggcagtcatttgaaatccaggatacttagtatatatataggaggacttcgtagtagttctctgactggaagaggactgggctgccttgtgtgtgtgagctttcatcatgggggcagtggttactacatgctatttctaagaattgcacttgtggggtgatttctactttgggtaggaggttattctaggtagagctagtgtggatcagcaacatcagcaccacctgggatcttgttagaaatgcagatttggggactcctaccctagacttactgaatcagaatctccagtgggtgcagttcaagaatgtgtattttaacaagatctccaagtcattggtctgcatgttcaatgtttggaagcattgctctagtgcagaggctctccaagatcctcctttgggttctcggcttatgtgattaatgtgccattcaccaaacatttattgaatttcacttatgtaggcacagcacaaagccaactctcacatggatcctgcttgcattctagttgaggagacaggattgtttacaagtaactattaggttggtgcaaaataattgaagtttttgccattactttcaatggcaatttcagtggcaaaaaccatggttacttttgtaccaacagtataaaaacagtgttaaaggctagtacaggaggcacagagaatgcctgtgaaagtggagggtggacgttttcataggtgtgtgcgggagcaggtggcatgcatggtagggggaatcattacttctgtgcaggactcctgagtaattttaatctgtggtttgctgctgtgcaaacccagaggcctgtctacaacttgtttaacctcccccagcccttgactgggtttactttattggcctgataagtagtataaaaattggcagagctattaagatgactcatggaaggatatcctcagcatctccttttggatctcctcacacctgcactgcttcttcttaaatgcctgaatatccaccactttgtaaaagaaaaaaattgatttgtcactgaatttccatgcctcagcctgagagaaatgtaaatgttgtactggcctttagtactctgccttcaagcctagatttagagctgatcattatacttttagagtaggctaggtatgaaaatagcagcaggttgaagagtcagaggaagctgtttgctctcatctgctggtttggtcagggtggaagtacgaatattaatacagtccacttaaacaataaaatagctcccagggaagaggaactataaacttcagtaaatatcagagatgttaaatgctaaaaataaaagctctctgcagttgtttggctctttaaagagattgtttattggtcaagagtgctagtctgtttggtcatgttttgctagctttttaaaatgcatgtatgtaaatgaattagaatataagttaattaagcagggcagtgtttctagaatgtgaaaatagtaacctggctagttaatttaattaagtccttggtaattttcttttagaaacaagtttcatcttgggaggtcacaacgtcctggctgctgtgcttctgagctttaccttgactccatcctctcctctctgtcatccttttctctggctctgtcacttgcatttgccccctgacttgtcaccctgacttcatttcctctctcccagctgtttacagtgctatcacagtggtctttcagaaatcccaaactctgctgttgaactgggttctaaaaaccttcagagacttcatgttgtccataggatacactgttttctgaactccttagtgtgccatattaggctctctacagtctggctctaaaatacaattttttttttttttgagacggagtctcactctgtcgcccaggctggagtgcggtggtgcgatctctgctcactgcaagctccgcctcccaagttcacaccattctcctgcctcagcctcccgagtagctgggattacaggcgcctgccaccacgcccggctaatttttttgtatttttagtagagacgggatttcatcgtgctaaccaggatggtcttgatcttctgacctcgtgatctgcccatctcggcctcccaaagtacaggcatgagccacggcacccggcctctaaaataccattatagcctaattttcaggcttactttttcttgtggtccaggccacaggactatctgctattctcaatacaaataaaatataaccagtagccaccctgcagtagtagggacaattcaggtgcctcgacaagcattgtctgattacactattcaatacaggatcaaagagttttgtcatttgcccaaggtcatgtaccttgtgttagagctgagattcatattcagtattttgatattctgactcagtttcctgctttcatgtctctgtgctttccttgtatgttttctttctttttttctttttgaggcagggtcttgttctgtcacccaggctagagtgcagtggcacaatcacaactcactgcagcctcaacctcccaggctcaagtgatcctctcacctcagcctccccagtagctgggactacaggtgcacaccaccatgcccggctaatttttgtactttttgtagagacggggtttcaccgtgttgcccatgctagtctcaaactcgtcagctcaagctctctgcctgcctcggcctcccacagtgttgggattacaggcgtgagccattgtgcctggcctccttatgtcttctatgcctagactgtctcctaccctttttctttgcagacttggaaatgtataggtgttaggtattcctaacaatgtgcgtgcataggtcatcgggcctatctcaatttagcctgatagtgtaaatactagtactactactacctagtgctagtactaagagctgatcccagatcttaatttttcttcatttctcctccaaataataggcggtttataagtattatggaatgaatgcatggatggatgaaaggatgactggatagatggatggtcagtcccagtggttgggtccgtttgtgatttgaccaagttcaaggctgtagaattgctatgtggaaagaatgcatattatttcagctatatcaaatagcacctagggacggcctgactgacagggaacaaattgtcagccctcatttggatccaagtggaaattaatctgaagaatttggaatgggcctattcgtgggaaattgcttatttttataagagtttattttctgatttgtggctatattcgttggctagggccactgtaacaaagaccaggtgacttaaacaatagaaatgtattttctctcagctctggaggctagaaggctgagatcaaggtgttgagaggtttggtttcttctgaggccaatctctttgtcttgcagatggctaccttgctgtgtccttacatggtcttccctctaggtgcacatatccgtgttcagatttcctcttcctttaaagacagccgccatactggattagagcccaccataaagacctcattttaattaattacctctttaaagaccttctctccaaatacggtttcattctgaggtactgggggttaggacttcaacctacaaattttgaggatacctcattcacctctacccaacccatcccctctgccttttcctcttgttgtctttcttctggcagttttgtttcactcaagggcagtcaggaagagaagtaaagatagaggaaaaggaaatttattttgggtgcagttcaggaggtgtagctggggttggggatgggcagtggctgaagctattggtggaaatgagattttgatattgcctatagattagtattgtcctggaacattctgtgctggtttcctggacagccgatagctggctgtgtgtgttggagggcccagggaatatctgttctgttagtaagtgagggggaaattgataatcctgcagccggcctggagaagtaaggactctatctttgtctgtcagctcttcctcccagaagtagctcagagacttgctgagcacacctagggtagaggccaggatagttgagttttggacgctctgccttggctaacaccttgcctggcatctagcagatgcttatgaaatgtttgtcaaattgaattacttaatttacttgactcaaatattttgttcttctccaaaccttttatgaggagttttttctccacctttgtttgttaattcccaaacttctctccagttctcagttgtggcttatgtcttttctttcctttctctttgtaattatcaggtaatttattaaatggagacaagcttaactagacattaaataattgcaggtgtgcagctgaactgagccgctgtcctttaactaggaaatcacagctgcttgtgttgtattgtgtgatgagattacacttcacctcatttggttacacgatatcttgcttattgtaaggtaaaagaatgttgaagcttctgctctaagcagtacacaaaggctggtatgttcccaggaaaccaacgtaaaaagtacttggaggtcaggtctggagcctttgcaacctctgatgcttctcttttcttggaatttttcatttcctttgcctttttctgtatagagaacacctgaattactccttaacttgagacctgtttcacattttaaaattttcttttggtcaccttaactgtaaaagcaagatttttctgtttccttctaagagattagcagtgggtccattggttagctctttttttgctttcattatcagacctcatctgcatactttttatacaaatttgccccattggtaagaattgtagcttttatgaatgttaattttagtcataggttaaattgtgatgtcaccagtctgttttctttggctagtttcatagtttgtgactattgctagaggtagacactagttatatagcaagtacctagcttattacagaactcagagtatgctgctaataaaggattgcttgattgcttgaagggtatgcaggtgtaagaaatattcatctttcaattggtgtcaaaatttttatttaaaaaaaaagtcatgctgccacttcccagctttgtaactttgggcatgccactgaaatatcttaatcattagatttatcatctaggtagttgtgagggttaaagaaattcaacaaatatttgaatgaactatcttttgtgcctttctggatgctagggatatatttgtgaacaaagcagaataaattcctatccttgcgggattaacatatatgaatctggttttgactgtcaactggatggagtccaattggtgggagaacatgatacctaccatttatgaaaaactctttaaactgaaatatgtgcctaataacactaactttctttattagggacattttaaccccatttgggctttgcagagtaggtcttagagaaagcccttctccatacttgttcgttcagtcgtgtatcatgtacagccatccattttatggttttggctgttgtaaataaaatggctagagcctgtgcatctggagttgtggtgactcttagtcttgggatgcgtgcctcttcctctcggtcgttgctttataggctgtctctgaggttccagaaggggctcagagaatgagctccaactgacatgtttgagcctttgagtctcttcatgaaagctcagtttgttcaagtaaaatctgaatggctcagagaggacactgtggtgtttagcttaccaagcccagtgtgatatcactggtttgttaatatctacagaaacacacacaggaaaaatattctagagcatcatattgctcacctcctctaaattcttttttcatggatgatcgaaagaaaaacctttttgagtctctctcttcttttttgtgaatgactaatagaaagaagacgacactggtaactttcagaagcattgtgatagcattctgatggtgggattatgatgttcagacatgggagggtattagcaaccaaacatcatttcctttaggggactggaggtagtggtcatctgtgagtctagagctgtcttcgagggaagtgagcagtggctcttccaaggacacagagatgtcaggcacctctctcatgcatgcaagtgctacatattatgtccacagtatctggagtatttaaaccaggaataacacgtagtctttattattggaagaaataaattaggtcagagttagtatgccatcgtgtgatgccagtttgtattctttattttctgtacttgcttctagagagggagtaaatactatgagataatgaagaaagacatgtttttgtgacttttctgatttaggacactttatgttgtggaggttttttgaaggatttggaatttggttgcttattgagaacctcttgagaaaatcagattatctctgatacacaaccagtcctacattgagttttttccatttattgctgtagagacatgaacatttatttttattgaagctgagagaggggtgttacatggttgtttatcagctctgccaaaagtagctcagacatccctgatgactcagctgatgcccttgctgcctgattgggtgcttgtgtactaagtacttgtttccttgttgagggctaggaatatgtcacaaagccccattgctgtggggattgttgcagtgagcagacttagcggaactgcacaaggctggctagaggccaggtttagactaccttggaagaattggcttaagggcagaggagaggtttagaaaactcctttcttcctctttggtggcattaatctttgcgaaaccaggctcagactccttttgcacctttcccaggaatggggtagcatagatcttcttcctatgtgaatcacagaaagggactttgtgtgggtgctgtgtgttcattgtaaaccactggtgctgctatctaggtggagttaaagttgataccagcagagtaagttagcctgagcaggaggatggagttctgcagtacagccggaaattttcacttcatagtgtttctactgtaacttctcaccctgtgttgaaaaaggcacacctggccattcgcatagtttggatacgttttaacccataagagtgctgtccttaaagatgatgaaaagagacattttagctccttggaaataagcacatttctgaaaccacccgtctgagtgcacacttgtgcagataaacaggtacttttgtttatgctctgactcaagtggaaagggcaaaataagagattttccttctcctgagtcttttcactgtgaggattttgtcctttaaataaaataaaccggaactgtaacctttattatgggaggagtgtggaggagttaggaatgaggcaaaatgccctccctgtttctcagataactcttgctaccgtctgagcagtgtttatttaacagatttaatgcattgcctcaatagcatcacacgaaacatgtcaccccccctttttagtttcttcccttcaaaaattttcttaaaaatgccagaaccttaccaagtcacttaaataaatcagtccaagtatgaaatgatctctgaagtgacttaacacaaatgattctgactttactacttgggagactcttttttgatggccagccctctaaattgtaggaagatcattttctagctccctattgtcaaaaaacaaagcaaaatcaaattaaataagtcccttaattcccataagtaattttaaaattatctcttgtatatactttacttgtgtgcagcttgcaactgaatatcattgtgagagctatagtttgtcagggtttagatcttaattagctcatgagattgcatccttttgaagctgtataccacaggttgttggctagttttccaaaagcaattaaaatgcccactgttataattaagcctgttactagttgtatgttctagttataaaatatatttggcaattaaggaaactgagattgaggcttttggcttggctctttgagatgcagtagactggcttccaccttgatctgttaggatgactggtgcggatgcctggatgatgggacatgtcttagtccttgagtacctatctttatgagtaagagcaaccacaggtttttacaagaaagctaaagttagagaatgtgactcgtgtcctcacatatgccgattatgtcctacttggtatacaggagtcaaaacctaaacttctaagttgcagtctcttagctgagaagtcctttttaaagaagcattcccttatctttaagaagatggctcgactctgactgtgaacatttaatctgttaaactaacacctccattgcgctgtttaaatttctgtctggttgttgaaaagaaggtgtgggagaaatgttgcaggtacatgtggttaatgtctgtttctgaactgtatttcatttaggagttgttaagctgtgtgcccaccatctcagagacagatttgtctgaactggcctgtggaggaagatctcattgtcagggctggtctcaatggcagatacagttctcagtggtgtgctttgcgtgtcgtgtcttttattcttcctttcctcctgctcacccttaggaatgtttcctttttgtgccttaacaccagaacggtatggtggctgagaccatgggacaaatgcgtcacttagtgggcagatagaaatcagtatttaaagtatgattgaggtttttgtgtttattttgaaattcatttagtacacagggaagaaaacagcacttggcttatgtggttctatcccattgctttgcctgtttgtgcccccgtgcaattaacatgaaaatgatagtttaagaatgagctcattaacatttagaactgggtaggaacagggcttcataggatgttaaaatcagagaaaaagagaaaagagcaggtgctttgtaaatactatgtggttttgagaaatagtagaaagttgggtcttattttaaatttccttttttccagagtccctttaaagttgtgattaatgatatacattattttctttattgggcaaaatattagaattattagagatacatttttcttgggaaaaccactgtggttctctggacatttctatgttaactgtgtcatatattagtatagaataaattcacaggcttgtgggtctgaggacatttgcttgtttcctttaaatcaatttatacaagcacttcctatgcttccttcctaacaaattttccataatttatttctggcctcgtaaaaatagagggaaaataaccaatcaaattattagctcgattccttacatgagttcttcaatttttcctaggtaccaaacaaaataaaaccagtctttgtaacaaagattattggttctgaggaaatgactatccacaaagtgtacatttgtgtgtaatatgtggtatgcattatgtgtggtattttacagttaaaatacaacataattaccataaaataatgtatatgaaatgagttgtaacaataagataagattgacttttaaaaataaacaaccaagaataaacacagcagaattcctaatcagccttactcataggtcaaatttagctttgatgtcctttcctccataagccatatttaggcatcaattcagtataatactccttctttgtgctcccatatcgcacttcatccttccctcatcatggcacttactgtgctgtgttgcttgtttggctaattccttcatttggctataaactattaggatatgagcagacatggtgcctttttcactttgtcctctgaattctttttttaaaaattgaagtaaaattgacatgtaataaaccttggatatttagtatacaatgtgttaagttttagcttagtgttgtccatgaaaccatctcacagtgaggatcatgaacacatttcccaaagtttcttcacgctcctttggaatacttacttctacttctcttctttccttgtcttgagacaaccattgacctggtttctatcattgtagattaattgacacttccaacaattacgtgtaaatgaatctcatatagtatgtactgttttcttttccttggcttctttcacttagcataattaagattcatctatgttgtagtgtatattgataatttcctttttattgctgagtagtattccattgtatggatacaccaaagtttgtttatctatttttaaattgctgagcatttgagtaataccagctttttgcagttataaataaagctgctatgaatactagaatacaagtcttcgtatgggtatctacttttgtttctcttgggtgattatgtagggtggaatggctgggtaaatgggcaggtgtatgtttaactttacatgaaactgccacagttttctcaagtgttagtaccattttacattcccactagcagtgtatgacagttctagttccttcacatttgtgccaacacttgatatagttgatattggtaagattttagccattctaataggcatgtagtaaaatctcgttgtggtttacattttcctttccctactgactagatgttgagcatcttttcatgcttttgctgtccatatatcttcttttgaaaaccatctgttcaaatcttttgcccatgaaaaaaaccttagttgtttgttttcttattgagtttcaagagcttttgtttgtttttattgacacatgattatatgtatttacaggggacagtgtgatgtttcaatatatgtgtacattatgtaaaaattaaatcagggtatttagcatatctaccacctcatacatttatcgtttctttgtgacaacattgaaaattctctgattttgaatactacaatatacaacccatctttggtatcaaattttgaaatatacaatccaatatcattaactatagttaccctatagtgcaagagaacaccagaaattattcctcctatctgtaatcttgtacctgttgaccaatctctcttatgttcccctgctttcccttcccagcctcagtaactactattctgctttcaagagtttttttttttttttttgagagggagtgtcgctcttcttgcccaggctggagtgcagtggtgcaatctcagttcactgaaatctctgcctcccaggttaaagagatcctcctgtctcagcctcctgactagctgggattacaggtatgtgccaccatgcctggctcattattgtatttttagtagagatggggtttcatcacgttgtgtaagctggtctcgaactcctgacctcaggtgatccacatgcctcgccctccgaaagtgctgggattacaagtgtgaaccactgtgcccggccttaagagttctttacgtgttcttaattgaggtgttttattaaatgtatgatttgcagataatattcttccagcctgtggtttgtattttcattgacttaacggtgtcttttgaataatagaggttttaaattttgatgaagtcccaataccagtttgttcttttatggagtatgcttttggtctcataactaagaaatctttgccaatttagggttacaaagtttcttctagaagttttgtcatgttaagttttacatttaggtctatgattcattttgaattaatttttgtatatggattgaattttttttttttgagatggggttttgctctgttaccaagtctggagtgtgcagtggtatgatcacagctcactgcagccttgacctcctgggttcaagtgatcctcccacatcatcccctcaagctgtagctgggactacaggcatgcaccaacacacccagctaattgtgcatgtgtgtgtatatgtgtgtgtgtgtgtgtgtgtgtgtgtgtgtgtgtgtgtgtagagaccaagtctccctatgttgcctgggctggtctcaaactcctaggctcaatcgatcctcctgcctcagcctcccgaagtattgagattacaggtatgagccactacacccagtgtaaattttttttccatataggtatctaattatgtcagcatcatttgttgaaaagactgtccttttccattgaattgcctttctgcctttgtcaaaaattagttgtctatatatgtgtgatctatgtaaaaattccttattctgttccattggtcagtgtgtctgtcccttcccaaataccccacagttttgattactgaagctttatattaaatcctaaaattgaacagtgtgagactttcaactttgctgtttttcatccttcttttaactcttctactggttcctttacctttccatagaaattttagaatcagcttttctgtatccacaaaaatgtccttctgggatcctgattgaaattaaattaaatttgtataccagtttggggagaattgtttattgtgttgagtcttctaattcacagtcattctccatttattttggtctttctgtaaattttttagcagtattcttgtagtcagtattcagcatactttatatatatatatattatgtttactctttttatgtaactttaattcaaaaggtacagagactctcccttagtgctgttcttaagacatgtttatatgacatctttccattagtatctttggtcgtgttcctgcagtatcctcagttgtgctcaccactgcttaactcacctttgcagccaagtttcattttgagtcaaatctaccagaggaggtcatttaccacctgagaaatccctcacttagttttaacagaaataaataactttaaaacaattgatacagctccttctttggcttgtataattttcttcaggcataagtaaaaaaaaaaaaaaaaaaaggaaaaagtgatttcaaacatgttcagagtaactgtaatccagctgtggttgaaagaagaattttgagtggttaaagagctgactgaccatgttggtggctcttgaaacactatcagcttttcttaaccagaaggcaatcaaggacatacttgaggtcgggaacagatatttcataggccactggagtgctgcagtggaaggattccctccagatccttggttcacagacagggaaggtgaagcctgaggagacttggttacttggtttccttggaggatcatatgctcagtgagctcttcctgaaaaccagccctgttcccatcagaaactgcagagacatagtacttcccattcagcaggttacatggagtcagcgtaggcagtcaaaatggagagatgaaggattggtgttgggtaatgagagcaagggatggtcatagaactcagagatgataatgtgaccaacaggatcattattcaaatttcccaagaggcacaaatgtagatgatgattgctttcataagctagtggagttaatttctgtcagacactattctaagtgattttgtatatgaactcatttaattttctcaacaaccttgtaaggtataggtaccgtaattatttcattttgtgaatgagcagaaattaagcacagaggtgccagagatcttttctcataggtgatgaaggtaggagaggaacccaggcagtctggctatagagcacagagtcttaaccactacactgtctggctgatggcaaagagcatgtctattaagaaagcctatggggaaatggtcgccaaatccttctctaattcttggggaccctgagtttcagggttttttttggttttagaaataagggaaactcctgtcaaatgataagattgacatttttcatttttgaagttctaaatgtaaagctctttgaaatgtataggttttcagatactctgtgtgtctgtgtgtgtgtgtttgtgtgtgtgtgtctgtgtgtgtgtgtgtgtataagttcagctcctttaaaagccccatctctgtcacaatcacatttttttttcacaccgcattccaccctactaatactcagagcttagattagggaggtgactaggatactgttaattaaaactatatgacctgattagacaaattaagagaaattttcgatagggaaaagaagcaggacaaggactgaacttctgagagatagtgaaaaatcaaggtgtttttcttattctcagtcacttcacattttacttctgacactagatgtgtggtggattttccccacacaccaagcagttctccagaagacatcaattaattagctgaacttattcaatttaattttgaccctatataccaggcattctgatactgtctacctggagatagtatcagatctcacaatctcagggctcagtcccacacaactgcccccgacttcagacaccaattgcaagttccaggtgatgtgtacttctgaccaaccagctattaatcggggttctcatgaccccctcctcaggtttgattaatttgctggagtgactcagagaacccgggggggaaaaatttgcttatgtttgcccacttattattaagaatattacaaaggatacagatatgaacagccaaatggaagagatgcgtagggcaagataggagagaaggggagtgagtggacttctatgccttccgtggacttgtcacccttctggaaactgcacgtgtttagctcttgcgaagctcatttaaaccctgtccttttgggtttttatggaaaatttattacataggcaggatcgattacatccttagccattagtgactgattcaacttttagcctcctctcttatttgttttaaacgtttgtttccaaagtttttttctcccctttgaggaggacagattcaggcttacatcaaaatggaattaaatgtgcctttgatttggaatggggcaacaagagccgcctgcatggctgtgtatatttatttatatggggtcaggtaaaagcacttttaaaataagcaagtattagagatcagaggttatggagcagctgctggctctggctgacaaagcattcctggtggcatttgccactagctctctgggtgtgggcattagagagtgtgagagttggcctgatggcctttgtgtttgtggccctgtgtggaaactttatagcatttcagccgttctaatctgtgcaggcacagagccacagctgaccataactcttaggggaaatgaggacagaaaagttgaacagcactgtgtgctgtgtagagtatggagaccagaatgaagggtgcagaatgaaaggaaaaaaaattttttttgaagtatcctgcttcagggtttctattgtttgggaaactattcctatagaaatgacatttgtgctttgtgaagggggtggaggtagattttctggagtgtaattttctggagtgtttccttattgaagggggaaaacaaatgattggaaaggctcttcctctgtttctctcatgcatccctacacccccaatatatgcagtgtccttgtttttgttaaatacagaagctatacagagggcagttagagttcatccaccgttttactcattggatgggattattaagagataagaccatttattgcttagcatgagaatcttactgtcccggccagcaaaggaggccaaagatttcatctgaactttacctcttcaattcaagccaccaaagatttattgggagtctactatgtaccaggcataacatatggcatataaaggctaattttaacaattatattgccgtttatgttgttggtttggatagaaaccctgtcttccactaatccttacttttcctataatacaaagattatcattgatgaaacatattacagattattattttaagctatttagcaaatattagacattttcttagagaatgtttgagcatatcagaaattgtggtggatatgttagtttcctatttgctgcaataataaattaccacaaacatagtgacttaaaaacaacacaaacttttatcttacatttttgtaggctagaagtccaacatggatctcattgggctaaaatcgaggtgtcagggggctgtgttcctcgtggaggctctgggacaaattctatgacctcatctttttccagcatctagaggcttccctgaactcctaggtgtatggctcttcccttcatcttcaaagccagcaacagcagattgagcccttcttaaaatgccatctctttgtttctcttttccatagttacatcttcctcttccacttttaagaacccttgattacattgggcccaccctgacaatccaggataatccccttattttaagatctgctggttagcatccttaattccatctccaaccttaattcccctttgctatgtgtagtaacatattcacaggttccaggaattaaatggacatggacatctttggggagccattatttctacctgttacagtagggtggactttccccaaactttgctctttccccactcaaatgaaattgtatagtgccctctattaattctttgcaaaataaattgttacctatgaatgtgtcttgtgcgagtggtgggtggtttatcactgcttaaagcctcactcttcttcattgtgacaaaaccccagccacttagttttgtacaatcccagtgttcaaggaagctagagatcctcttagccagcccgcccgcaggggttttgcacacacattgttacatctcttcaaaatggctgtcccacctttgcttacatgaaatggcctgccttggcaaataaacctctttgaacagttctgtttttgttagatagttcctgctttaatttaggggaaaatatttctctttgtgggtttgtagaacctattggttcttgttttactctctggggtcatattgaataaatctaatttcttctttcacacttgaagcccttgagattttttttaaagacagttctcatatcccccaagtatcagacttaaaaatctcaatttcttcaactgggtctcacataaaactgtcttgagacttctctccatcctgttccttctcctgagtatgatacaacatgaagaaggggaggctgaaggaagatttaataggaggctttaaatgctggggggaattgtcatacagaaaaagctggtaaggtctttacatttaccatggaaacaagaaatcacaggctcatattgtggctaaggagatttaattagcaggaaacctgtcttaaccttatggatttggtgtcaggaaacctgtcttaaccttgtggatcatgcaatggactgcctgctatgggaagttgagggatcttttgccttagtgtaagacaagtcttcaagctcagaattcgtatattttgtgtaagagacgttgcttttagttaaatgttttgcttaaagtattcttgtcattgcttgtcatctatgcctgatgcctgaatttccctcttgtgttggttcattggatgtaaggcatcatcatgactgctgttaatcatagggggaaggaatatggttcagggctttatgaaggaagggaaacagtggcatagcacaggataattaatagcaagtggagtgacagtttgattccctggtagggaccctggcattgttgaaggaaaaaaaaatcactttattctttcatagagagaggcagctgtaattctggttggatggaatccaattaaaaggaactgacatgcaaattgatgatgagacagtgtgagcatagaagtagtccaagaagagttttgtaagaaatggcagagaagagtgtaagtaatttggcatggtaatgtgtgtaagaaaatggaaagctgatgggttggctacctgaacaattatgtctggaatctcagccagcagagaacaggagactggttggtttggtagagttgttaacaaaactttctggtgttttgagttttggtctacattttaggaattatagcctttcataatagaatgaatataaatcaacccttgagggttataggctttcaaattggtggtggttaaatataatattctcaagattctatgatgggagtcccagcctggctcttggaaagaagatctcattgtacaggtgtacttcacctgacctaatgatgtgttctcaaagatttgtgtgagaattggctcctaaatttaggatgaaataggagagcttgccatttctagtaatgctattatgaatcattttctaatgtaaaaaatccttttataaccacagtcatgcccaatttatcttttaagtaaattcataagtccacatattagatttgtttaaaccaaaggtatttttctttgaaatgaaataattgtaggggcacataacagttaagctttagagtaacagaggaaaaattgggtaagattttataagtcagtatattgctttttagggaggaaattctgcctaagaagtcagacagcttctgctgttattacgggaaaaggagaaggctgcccaacgtatttcagggagatttactaggatctcttgggaactgcagtagaaatcactacgaaatattttgaggatagaggaaacaggacaacagcgtttactaggttttattctgaagaaagccaaagaaggtggaatggagttcatcttgagaaagcggtagaagattgagaagctaagaaaagacttacacagcagcaaaaagaagaagagactggagtagtgggcagagttttcagttagcaagagagcaccatccaattgttatgctggtcagcagcaaggaacattaatgaaggagatgaagaatgaccagggtcagtttttgttcatccaggtttgagcagggtgttgcttatgatgctccatgcagttttgcctcccacaatctctctctgatctttgcctcctgatctgctcaagtactgcagcagcaatgcattctctactgaaggctgtcacgtttacttttcactgtgcctagaatgctcttaccctcaagcctccctccttcacttgattcaggttgctgctagaagctcccttatcagagagacctttagtgaccattctgtctgaaggaggcagacactcttcccttattccgcttttcttcatagcactcattatcacctcacacatggttgtttaatgtttccccaattttctctgctagaagtaagttctttgagagttcagcttcagtttcttttgcccatcagtgtattcccagtacctaatttatataaaaatttgtggaatggatttttagggtatctcttgcctatcacagtgagaagagctgagaatgaagaatacaggactcagtccttgtcctgtgttatgcaatgtattacatagttatagtaagtataacagcctgagcacagagtgctgtgagctttgagaaataagctagagatggtcatcacagaactggatcttgaatgataaagaggagttttgttctgtggtggagacaaggaatgatcttctaggctatcaaagcagggtgagtgaagttggagagatgtagaaatgagttttgtgtttggatgtcattgagtgattttgatttggctgctagagcacaggtacatgggaaagcatgacaaaggggcctgagaggtagggttggggaggacatgtgaaacatatgttgagatctgattggtaaagttattgataggcgtttggaccttgtcttttgggaagcagggaagtagcaatatccaaaagagagtgcttaaggatggattggaagagggaagattatagaggggatagagagcaaagcaggatgtgactttcccagccttgaaatgcatgagaaagtttgggatcctcacaatgaagggcaaaaaaaaaaaaaataaaaagcaattctgtttatggatgtatagcaatatattgtgtataggtggtggctattagaagactagtagttcttggaactgttcctttttttctcacaatagtagttaagctgtgtcattgggatacaaagggaaggagaaggctatttccattcttagaatagaaaaattggaaaatgccttggcaaatggaggtattcttattctacattttttttttttttttgagaccaagtctcgctttgtcacccaggctggagtgtagtggagccatgtgagctcactgcaacctccgccttctgggctcaaacgctaccacacccagctaatttttttatttttgttttttaagagctggaaatttgctatgttgcccaggctggtcttgaactcctgggctcgagtgatccgcctgccttgtccccgcaaagtgctgggattacaggtgtgcaccactgtgcctggccataccttacaggttaagcagctatgtggccttgtgcatttcatttaactgtgtttcatttgtcctttcatggagatagactttgttgatatcctttcatcgttgatgtgcagaacaaagtatgctgcttgggaaattataaacatactttcatttgaaatattgggtaatatcaggagtcctttgctttaatagaagtagatctggaattgcttttttttttttcttggaatatggtaacaccaaagcatctgagctactcacacccatttccagaggaaaacatgatcatttccaggagatggcctgcagttttaaagctttttgctgcttgttttctacatgtcaaaacacatcccatttcagcagttggtgagcgctaccatagaactgttcagaagcaagagggaggattgagtcatgttgtacgtgcagctgcatattaacctgcaggtcatagcagtccctgatccaaaggactgtctgacactttatccccgttcttactgccttcatcattcacagcagccagtgtaggactctcccactttagccttgatcatttggagtagcagaatcgtggtcttgtgtatatatagagtgttatataggccatgtgattctcggagacctttttaggaagtttgagcaaccttacatattggaattctttcctctttttgagaaggaggaaagaaatgtatgttttataaggattgctttgaaatagatccattttgcagggtttaactcaagcaaagaacagactagcttaatggttaatattaagttactggagtttgaatgcctaggtcccaattcaagcttcaccattattagctatatgaccattagccagttttctcatttgttagatgatgataattacaggaagatactgtatcttcccacagagtggtccagaggaatgaatgagtaaatacatgtaaatcacttagactaaggactggtattatggattctctgactgttagctgttttattcctgattttctcatagccactggcatttctaagaccttgcaagaaccactggtcaacttttctgcctgctatgtttaactagtagaagtcagaaagtgacttggtggcagagtgctagaaatgattcattgggtggactattgagcttcacaccccagtccactggcatcatgtaagaaacaactcattacactctaacggtagtttagtgaaatggatgagtagtcttagtctgcctcctcaggctgcaacagaaagtcaagccaagcagccaggaatgtctgggaatcacctggagagaggacagacatctgcagcacagtggaaggtgatagatgagtgggacccaggaataaactacagaagcagtgtggattgtgttgattctagcaagcaggagggggtctccatggtatttctgagtataagccaaggaaatgtgttaatgtggggggaaaaaaatcaccgaactgggagagagtcagactacctcgggtgtgacctttgccctgtcaccaacatattgtatgtcacatccccatggggcgagtcacattttctttctaactctgtttctttgtctgtaaaatgattaaatgatttcttgactctttcttttctagattctttttaacgatttcattagcttttaataactatgtgaggaaaggagagcaacctgctatagaccttggcctgtgtgagtctttaattttgttttttgttatttcaaagaagttcttgttcaaaagaccatgagacatttcatcattggactttttagggagttgtctctttaatctctcatatttccttttttccctacaaatgatatccacagtactgctgttgtcttgtgctctctggatcagcacttttccagagaaatgaaaacactgcacttttaacggcacagaaagcaaaattactgtagcatcaggattcaaggttacagaattggttaactttctggtttgttttgctgagctgaatgaaaaagatttgatcgaatgttactgcttagggataaatattaataaccacaaactctcttagtgatcattgtccccccttttgcagaaaatttcaaattatggtctaggacttagattgtgattgtcagctgaatatgggcgtgaaaaatgtggaataaccagataaaggacccttaattggttgtagaggaacaactttttggggatccatgtccagagagggaattggttctggattattgatttgtatcattactttgattaagtgtctagcagttgctgtagacctttataacattatataatagaaatggtattagaaaaaagtcatcaaaggtaggatttttttaaagatataagaaccgaagtttttaatcttcagtccttcatagagaagaatttattaggtttgagagttctcagtaccaagtaaattctaactgcagacttaaaacatatgaatacactcacatatagtcaccccatcctctggcctggttttgttctctattatagttgactttgctttaggggaaaggagggagagtattggtattaatttatttgaaaaattagcaggagtatatcaaacacttactgtatgccaggacttaccatgataaataagaggtggacccctgtccttatggagcccacttgaatcaaaaagtaaacatatgagcatgcaaatagatggctgtaagaatgtgatgggcatgccattttttctagcaggttgcctaccacatagtctatatgtgttagagatacacattaggtacacagaagagggtccatttgtggcatagagagagattagaggaatcttcatgaaggaagtgacatgatgatgatgttttgaatgacaggaaggagtatgcaaaaaaaggcagggttgacattccagacagaaagactagtatggaccaagacatgtggacatggaaatggtttgctccttttggggtcctgaaggtaataagtgcaatgaggctggagaactgggtttgtcttaaggggctatgggaaatgagggtcagagtgtaggctcttatgaaggctgtctggtcagacttgaggggaaggtatgctggtaaattgcactgagaatagttcctagctgtcccatatttcagcatctcctgaaatagatgtgtactgtgatgtacaagttccaggatacaatcagttcatgagtatccagttaatgtacctgcaggatttgggcagcaatatatgtagggtgttgtgtgaaaatattggatatgaacaattacaatcttggcttgcacaagaaatcattgtgatgcaggagggaagggtagaaaagttagattattttttttcccctctaatgcagtgcctctcaactttgttacaaattagaattacctggggatcttttttttaggatattgtttacatgcagtgaaatgcacagatcttaagtgtacacatcaatgaattttggcaaatatacatacccatgtagcacacttacccatcaagttatagaccatagtcagaacctgaaaaagttttttagtttccggtttgaatcaattcctgcccacccctcccatatgtaaccactgttctgattcgtgttaacatagtttagttttgcctgttcttgaatttcatgtgaatggaattatacaagtatgtgctctattgtgtttgccttcttctgttaacataatgtttttgagattgttctatattgttacatgtcagttttttttaattgctgaatagtaccctgttgtacagatataccacaatttgtttaatcattttcctgttggtagacatttaaattgtttcagatttttggctattatgaataaagctgtaatgatcagtcttgtacaagttttttttttttttggcagacataggtcatgatttttttttaacgtaagtgcctaattgtggaattttgttataggtatgtcagtgtatgtttaactttataagaaactgccaaacagttttccaaagtggttgtaccattttacattccctcctgcattgtatgagagttcttgttgttccatactgtcaaacatttggtatgataagtctttttaattctagccattctaatgggcataatatggtatttcagtatggttttaatttacatttctctgatgatttatgatgttgagcactgttttcttttgtgaagtgtgtggtcaagttttttttgaccattttcaatttggttatctttatgttattgatttatagggctctttatatactttggatacaagtcccttgccagatatacataatgtgagtacttctttcagtctgttacttgcctttttagttcctaatgacatctttggataagcagaattttttaattttgatgaagtatagtttatcttatttttccattatatattttgtgtcttttgtatcctcactaagaaatcttttcttaccctaggttatagaaatattcatctttgttttcttctagaagctttatttatcttttggtgtatgttccatcacaaatttttgagtgtgatatgaggtaagggtagaggttcattttctccatatgtttatctagtcgttccagcactatttgttgaaagaccttactttctccattgaatgtccctggcacctccgttgaaaatcagttgcttgagggccaggtgcagtagctcacacctgtaatcccagcactttggggggatgaggcgggtggatcacgaggtcaggagttcaagaccagcctggccaatatggtgaaaccccgtctctactaaaaatacaaaaagtagccaggtatggtggtgggcacctgtaatcccagctacatgggaggccgaggcaggagaatagcttgaacctgggaggcggaggttgcagtgagctgagatcgcgccactgcactccagcctgggagacagagtgagactccacctcaaaaataaaaataaaaaaaataaaaaatcagttgcttgtttatgtctatttctgtttaggtctatttctggactctgtgttctgcttcactgatttatttgtctgtcatcccagtatcacactgtcttgtttatctagctttatagtaagtcttgaaatgcagtagtgtgaatcctcccactttgttttcttttcaaggttgtttttactattgtaggcccttttcttttttatataaggtttagaatcaaattgtccagttcttaaaaagaaaggtagctagggtactttaccttacaaaatcccttgatacccagaccatacttcatcccagttaaatcagaatcatttagaaatgaacagaatctcgttcattccctagattcttctgagtgcagccaaaattgagaacctatgtactaatgggattttagtgtggtacactaaagaagatactgtcatggattgctgggatggaagccattccagtggaatgtatgcataggagctgatgtgggcccctacacgaaagaaattgttgatgtttatggaaccaggagagctgaatgaggaagagaaggagcaggagtgagaagccctgtggtcaaggtagtagagttccctctccctggggcacatggagccccattgctgaggcgctgccttgtgtggctcctattcctgattattcagggtattcccaccctaaacctgctgcagtgcagccaacaaaccaccaacttgaaatctagggaatactcttagtagagcgtgtaaatgtactattttaaagaatagctttcccctggattagggaaatgcttgtgaaatctgcatagtgatgaacagggtaggcacattctagaagtgcctgtgtgggttttttgctttttgagttttttctgtctttttaatgtaatgtctttagacaaacattgagtcatccattcttcccaagggtaggtagttcagtcagaagtgatgttttcccaaaaggctttaaagaaaaacgggacaaaaagttacgctcaagtaatatgttctttgggagcactcaaagtatgcaggctggtaggttgcttgcttgtggcttttttttttttttttttaatttaaacacacattttcctctttgaaaagagaggttggaactagtcagctgagtccctctttctgaaatacacgttccctaaacagctgtagagaattaatttcagtcaaagatagcagagctttaatctcagctttctgctcagtgttatggaaaatcctttctagaaaatagccagtgtctacctgctatgggatgttaaaaaattcaaacgaacattggattttttagtgttttcctagtagaaacagcatggaaaatcctttagtgagctagattttacagtgcacacagaaagcaagtatctatgatacatttataattttgtgtgtgtcacatgttggttgtactattttcttattcctaatagaattgaaatataccatgtccaattccaaaccttattttttttgtgtgtgaagggttgaagcattttagacaagaaagagctttgatactagcaactttaaactcatttataggatatatatacatatataatacatacatatgtatgctctttcaaggcagaggaagaaggtaggcagagtatgagaggagagttgcttttctttctcaacttatgattgtatttaacacatactcgcatgcacacacacattcttttaatagcattttttttttgtagtgagagaaaacttatctttaagaagtctctaatctattatgggattaagagttttaaatgtcccccaacacccccccccccatttttatacttttatttctacgatttatatgtcacgtgaacatcactttttggtggtgtgattatatcggaatacttttgtattttgcttaacattaaaaaagccatttcttacattgctatatcatgatagtaatttaatggcagcataatagtacctcaaattgtgccatactttatattcttctgttgtaagttttctattttgtgctgttaaacctcaaagaacttatttgtgcatagaatccctcttaatttcttcagtacatcctctgtgtagaatagtcacaaggtgcattttgttttttccttatctgtgtacagtttacactgtatatgatcctcagtgatatagggtgtatttaccttaagaatgatcattatttacatttctagggataaaaagctactggatttctttcataactgtattatttaaaaagttgttcttcccctttatttttgtgcacaaatttgagccacatttatgtttgtcttttaatgggttatgggttcaaatttttttcttaactggtatgtttttttttgttgttgttgttttaatttttttttttttttttttttttttagaaactaggtcttcctaagtaagttgtctggtttggtctcgaactcctaggctcaaagtgatactcccacctcagccgcctgtgtagctgggagtccaggtgtgtgccactgcacttggcaatatgtaactctttgtgatatttgtcatgagtattttttccaagttttttctttttttattttagtgccattgtgcctggcaatatgtaaccctttgtaatatttgtcgtaccttttccaagtttgttcttttttattttagtttttcattacaaagcagtttatgaagttttttatattttcttctgttgccttaagatgaacaaacttgtcatcccttctgagatctaacatcaattctgtccccacctgccccccaatatttcctgtggtttaattaaaagcaatttttaaaatccatctgagtttctgtcgatacatatgccctctccttacctgctgtgctatgaggaaaggtgggctaaatcaggagctcgtgttattcatatcttgggagaggaatagaaacagccagtactccaatctcagcttcctgtaatgtctacaagtcagtgtttgctcatctataaagctgggatgagaataacaaatgtacagagaatttttttaatgcacttaagccttctcttaagcactgttaagaacttcagttgaaagtgtttaaaataccaaatagctgtaacctttgattgttaatatgtgtgcaccatcatttcttggatttttctcaatagctagagaccacatgggatctttggtgttttccaaaatgaaccaccatgctattacctgcagacattaagggtctgattatacaaagaaactgagagttgaggatgtccatcagaaatacactgtttcaaagtcagatctgagtacttggtgaagactttggggactacttaatagtaatgattactagaaaaataaacactggcaatatagatagtggttaaaaaacatgggctttgggctgggcatagttgctcatgcctgtaatcctggcactttgggaggccaaggtgggaggatcacttgaacccgtttgagaccagcctgggcaacatgccgaaaccctgtctgtataaaaaatacaaaaattagccaggtgtggtggtatgcaccttaagttctagctatctggggaactgaggtagaaggatcgcttgagcctgggaggtcgaggctgcagtgagccatgatcatgacactgcactctagcctggaagacatagcccaaccctgtctcaaaaacaaaacaaaacaaataaacaaaaaacgtgggctttgacagagagacttgtttaacttaattaaacaagtgccacttaagtgatttggggtgagtaattttagctctctaaactcagtttcctccactgtaaaatggggataatattgatgagtggtttaattaagaaaatgtatgtgaaatattgagcatggtgcctgacccatagcaaatgctaagtaagtagtagctgttattacttttattaacaagtaacatttgtataacatttatgacctacagagccctttcacatgctgtttcttatttgtgaactgagtgttttatacagaatgggtttttaaatgttccataggctttttattcatggcttcaagaggttgttccctttttgggacctgtacagcttgtgtatactcagttggcatttgtcacgtatcttcatgccagtgtctttgtatctgaattctaaaactgcgtgaacacaaaggttatgtcttttgtcttattcatctgggttgtcactggaacagagtcaggagacattcctatttattatgtgcgtaatcgtaggcaagtcaatctctggcttgccaaagctgtcctttcctcatctgtaaaatgggtaacaagtttcttgtgaagattacgttaaataatgcattaggaagcactttgtatagaaaattacaaatagttttttgttttttgttttttttttccgccatgcctcactagcctagtatcacagtagatgctgtaaggttggaggttgttaggaaggctatagagccaagtcttaactttagtgtcacaatacctttgttaaacaatgaaattcagtctttgggggctagttgtcatgctgggtgctgtgccaggctaattaatactttggtaccttgcctttaaagtacttactgctgctgtctccctccctcccctttggtattcattatttatagtataaaacatttgctgcttgctgttgtaaaggtgggggatggggtgtagttacacataggtgctcagagcaggttcaatgatttaaccctacatgaggaagtaaacttaatctacataaaatatggatttgggggtgtgtgatctctgtggtcagtctggaggagtgtgcgtgaggtgtgtcagccactaagcaaacaatggagtgctggctctgtggactcttggctgagtcagcattgtttcccatggaatttctttttctcttagcccacaggtgtatttatgtgtcctggtatttcttcgtttttattttcccccaatttgatttcataaatgatagtgcaaagtgttggctatggttaatttcagtaaataaggcccaaatatgaggtatctgtttctctcttgagtaaaaaataaagtcatgttatggggaataaaagcaaaagcatttaataaaaaaatccctttgttcattttagaaaatggtacctttgttaattccttaagagacaatttattatattctgacactatctttgaatagtcaaagaaggcatgatgtctcaatttaaatttcttcttcctggcacagcttttattctgcaaggtttgtgcttttaggaagagggtattgtttctcataggagagtagagtgcctagtggacagaaaaaggtaaagattgtcatttccttgaacatagattggtgtttaatttctacttaagggtgtcttttgagaagaacagagcccactctgtttagcagcttgctttttgctaatcatgtggtgcatggtgtgttttcatctagtccgttccattaagtcttatttatgctttggggatatggataattggctacggctcaggtgaggtgcataggtgatgtgtcatttctctcctgaggggatagagatgacaggcttcttttagataatcactgtcagtggctgggacccaggaacctttggtattcacctgtttagtcagtggggggcaaatttgatgcaagagcagagagggaactgtttttaaactatgtatatagtcactatgtgattaactctttggtggccctttaagtacaggataaatttgcattagaacttagtgtctcagagtcttcgattacatgaagtctgaaaaagtgatgaccaattgtcaatattttggacatattccatgagtgccccctcagaccattggtagagataggtttgcaggtggtgaccctggtgaaatcctcctctgagaagggagtgttcaagggcatacgttggcatcatttaagtagcagaagagagcaccccattgagatggtttaaaaatgagatgctaactttcaaagttttttaaattttattttttacaatgcctgtgatgctactacattgtataaacagtatgtagtgttaaggatgtgcctcgcatgtaagccaccactagcatccttagtgtgggggtactgttccttttctacccaaatccctgcaagatgttctgagattttggtgccaaggagtctcccaacattcaacattgttaaaacacacttccttatcttctttgaggttttttaatagcaaatcccaagccactcacctttttctcatagtattaatgttctaagagtggctatacattatgttaaagtcagcgtagttctccacgggaaggctgttttttaaatgagacttattcaacctctttttagctggtgtttcattaccaccgaggatttataatgcaatagctctgaggcaaagctggtaagaatgccagcttcgctaatatttagagtcataaaattctggatattggacaagctcttaattactctgaatccgtctttgtcttaataaaagttggattgtacccactaaaacaagatggctgtgtttgcattaatctccaaatgtaggttaatacctttttaaaagctgtctcctagacaagagacttgaaaattaatttcccattttcagcttaaaacgaagagctcttccacgtgtggagattgaagggctgccatttttctgatgctgtagattcaagtgccaataataactctttgttcctctttagtttttttttttttttttaatgtcttaggtaaagaagtctttcttttctggtgcttggggacttgtattttttaaaaatctgcttcaaagtaaatagatgaaatttcattttctcagtggagtttggatcactgggattgagggggatgaggaagggctagatagatagtatgaaacctattggattcatactatggctgcagaagtctgggctttacacattaggttgctaccaagctggatattttgaaatatatatatgtatatgcctgtaatgttttagcatttgcttgttgggttttttttttccccataatggtaggttcttaactgactttttcaaatgcaaggtaaaactttcttttccttttcttgtctccagagtactgatgtgtaaccacttagtaccactaatgccaggattcatttctgtgctacagatggtcagtgagattataaaagctctgaaaaggtttttatataatttgaggtcttctcagttgagagtttgtgtctgacatattaattccttcccatccaccccctgccccattctcaatgtaaaccatatgggacatgtattaaaaaacaaatttcagacattttctggagattttaattcagtagttctggaataggttgcaggaatctgactcttaacgatcaagcacatttgatattcagacaactctattgcatcctccagaagctccaggattctgtatataatttgtaggatatacttgcctcttctatgtcaagtctcttacccagtctgattatgtgagatgtcttaaacagagcgttttttcataaacctttatgtaggataatactactcctaaaacactttattacatagtttttggattggtaatggcaaaagaatgagaaagcacctgaggaggcaccattgtgagtgatgaaactggggtatcagacctggttatgaaaggagatgataacccttgtactgttttcagacagttgcagagttatcctatgaaggaggaaccataattctggtggccctgcagagcagaccggggactgatgaatggatgctgtgggggctgaacataaagagaacaggtttaacagaagggaccaacatcctttgagagatactactttttaccttctaattatttaacccatgaaactattattttctcccaaagacacctgtttttagactatcagttaataaaaagaatggggctacttaggtggaagctggctgaggggcacaaacagattaagccccttttctccccagagctagcaagcagtacccttagccagaagccttgggctccatagaagtggccacaaacacaactagagtatggtgagttctgttcagtggaggtggccgcacagccccctgacaaggagtcttgtgagctccgtaagggctggcccttatctgatttgctgctgtagacagccagtgcaggggactagcacagagggcagagcttagtgaaatgtctgtcaatgaaagctgtggaggacatttgtatctcacattcagtgctgaatgagatttaaaagtcctttctaacataaaaagtctgtgatctctgcttccaagattaattcttaggtctcagtatggatggcccaaggatataagctttgtgtctgcagggactttgtttcctatagtgctggatttccagtacgtagactagcacctgacattagtgggcactcagtgaatatttgttgaatacatgcatttgttgaaaaaagtgaaaattgtttaaagtggtactttgtgaacctttttttctcttttttctgtcatcctggagacttctcatttaacccccagtctgtctcgtgatccatgccccatccttccttcatgcctcacaccacctccttctcaatctatacttggcaaagaggaataaagacgctaaggatattgtggtaaaccaaagtcatctcagaaacacagtgaaattccctaggcatctgaattgggaaacctattggctgatttgctttgacttgggtatttcctgtgattttcagccgggatgtgctcctgtgctcagaagtgaggatctgttgtaggtttatggcctagattaattgggatattttgtgaagtctctgaagtgttatcacttcatctttatccttgcctgctattcctcatgaaaagcatttgaattattttagagaagatataaatttgcttgtgttatccagtgtcagcttaaagctgattagcattttgcatcacctttgcaactcataaatcatccacttaccctctcagtaagcaggctgtaagtcagcatggaagcacctgctgcagcttcttgtcctgtgatttagaggacactccagattctctgcagacccttctgtggtgttattctctggtaaggcttcacctatatgggaaatgagtaaagacttttggtgacttttttttccctagggagttcttaagggttaccctggacgagagacttctcagaaatatagtctttaataaacctggtccaggcacaggtttggttcatttggcatatttgttgttttaaaaattttggaggtacttttcaacatttaaagtccaggacatttcacatttaaaaaaatccagatttagggttattccgggaaaatcagaacacctggcagtgtcaggccatgctgcatgcctggcttcatttgttattgagagcaggagtgctctaggaaaggggtacagattttccattttgctgtagactctacccctctcagtttttccatgggagtcaactttactcaaagtcctgcactgtagatgcttgaattggtgacatccttctatgttgtgcgagtgtatagattgttttttttgtttcttttttgagtaatatcaaccatttaactcaattgaataataacaagaggctaacatttatcaaatgctattaatgtaccaagtactgtgctaagtgcttgtaatatgtttgtttatatattctttacaattatcctaattgtatagatgaggaagaaattgaggcaaagagaggttagataacttgctcaaggccacctagctagtaaaagtcgggcagagtcactgtggtgtcctcagaagcaagtccctgcttgggctagcatttttgcctagtccgggttatctccagaacctggtctgctcctcattcccatatcccattaggaacagtgggcatcagttgcaaaagtagatgacagtaacacactccctaagtccccagtctgctcctgggaggagcagcctgccttgttcatggcagtcatagccacagggggatgtttgaaagacagccccttatacagtgtctattgattttcttcaccctcttgttttgctcatccatcctgttgttctaggatgcttatttgtcatgcataaaagccttgttacagtgaacccaaacaagtcattgacatttaaaattaaattgcaacaggtattgtcaatagctaaactgctcattgacagtgcattgctaattgcattgagagaacatcctaactgggtatattctgccaaatcaaatcggaaacattggctgtctaccagcaaattcattttgacttgcacagagtttggggatccacagatccctcaccaatctcaaaatactgtgtttatggaaacgctaattattatttttttttttgctgaggttctttgcagagaaggggaattctgatcatcttcactgactgctaagccaggagtcagaaactgtgcctttggaagggagagaactacagatttggggtggagtaaagttcaatgcaagggggtcatttggggaggtgggccatcaggttctttatctgtaaatctaagccatatccttggatccattttttttttccttctctcctttttcatccccttctctctcttctataggtacatgggagggggacaagggtggagacacttaatttttattaagcactgttcgtggtattttatgtgaattaatttgtttacttcccacaatgaccctggggagcagatatgctatcaggtaaaaaaactaaggcacagagagggtaaaactcttcgaaagagtcttgtggttagtcagcttctgtgagagtgagagtgggctgccctgaggccatctgttccctctccccagctgatatttttgtgctctcagggtaaacatttaagcctgtgagttaaactcagccttggactagctgagttcctctggaggccttgcaagtagcagtttggttggcagggcaattaagtatgctaggtgcactgtgctgaaccccaggagggagggaaggaatggaatctagtctttgcttgcgttatacatgcttattggtttgtggcaggcgtgattgatgccagaatcaaaatgacttaaagcagcttcccttgagaagcactactctaacggttttttttcctctttgttgccctaggtcccttgtgaataggatttagctctgattcagctgctgctgttcttttggtaatcagtgtggaggaaggagatgagggctgctattaatggcttcttattttgcattctcctaatcagatatcctgcagttattagtgtgaatgcaagatgttcggtggtgtccctgggtggttttcttaggtgtactggactgttagctttctaagatggaatgttttattaggttctggcctagggggttggttagatgggtggaggttgttaaaaagcactaaagaaaaggaataggatataaaaccaatcttcagggggtgggaataacaacccaccaccttcacttccctcccctcctgccctgaaaaccttatcttgctaatacccttcagatattaaaagtgaaataacagagctatttactaggcagctaaatgcaaattctctcccccattagttttaattaggatgaaatcatacatttaaataaccacttctattactaataactgaacttctgattcactctgaacccaggcaaatgcctcttctggtatgaatggcccacctctgagtcattccgcacctgcatattgacacagccaggctcctgatgtgggtacacacatctgggatttaagggcatgactggcatgttgaatcttgggtataaagctttctgcactataccctggggacaaacaggatagctcaactggagaataaagagcttgcaagctcaaaagaaaacaacaaccaaaaatacctcaaccaaattctgctcttgcttctatcctactgtttctttaggtgtttaaagggctgtagttttaaaaatctcccacccacctcatctttttaagtaaatgtcacaacagtactatgtcaatacagttgaaaataagtatttgagttgaaagaattggctctttgaggctttaactatcagatttgtgctaattctttactgtttccttgacatagtatatgcagtctgtgctaagagagtatggatgttgtcgtcggtgtatagaatggtggctgttgtaaacttctgtatgttggggaaggattgaacctgctgtctggagaattagaaaccagcagcttgacttaaatccctcagtgtcacaaccagctaatgaaggagaggactgctaaactcccagtggtctttgtggctacgaggacttactcaagtttgagactatctttagtgggccaatgacgtaggaacacaatcagcagaggacatgtagtttacagcagcctgtaatgtgccagagacatgactagctgcctctttggccctggggaagtgtgtctggccctgcttgcatcctctgtgagtgggaattgtgccagacaccagctagacatgaccagctgcttcttcgatgttctgtggacatgattggctgtagcttttgatcaggacagtgttcctaatgaagtgtgaccagcgtcatttagacaggaaagaatgacagctgatgtgcaagaatttttcttgattggcagcatttggaactagtaaccagagaaggtaggtggggggaggagaagccagctctgattgacaagagcttatctttatttaatctacttctgaggcactgaagttgaaatcttaggcaagtgaaagaaaggaagacacaattgtgaaacataattaaagattcttgacaaaaacatacttaaatcagaaatgtcttttttttttcttttttgagatggaggtttgctcttgttgcccaggctggagtgcaatggtgtgatcttggctcactgcaacctccacctcccgggttcaaggaattctcctgcctcagcctcccaaggagctgggattacaggcgcctgccaccatgcctggctaatttttttgtatttttaatagagacggactttcaccatgttaggctggtctcaaacccctgaccttaggtaatctgcccgcctcggcctcccaaggtgctgggattataggcatgagccactgcgcccggccagaaatgtctttcaataggagagcaatgcagagtttaggtgtgaggttatcactgctccttcggctatgagaaagagcttttgcccagggattgttaatttttaggcaaaatttaaagtggcgatgggcttggatagttctagcaataaaaaaagttctgcttctagttaccatcttgttgactttccaacctacttggaaagatttcctttggagaggccaaaaacaagtgctgtgtatggagtgtggcctgtggtggtaatttctcatcaactcttgatccactgaggatttaaatcttaagtcttcatgtgctttgagaaaagatgacaagcggaaatagtatgtttgtttcctaaggacacacatgtgatttctgagagctgattgtatgcaatgtggtggtattcttttgcaaataggcttgggaacttggcatcctggattcgaatctgggcaccaccattttccagctcattccttcttattcaactccaccccacctcgaaccccgatttggttttaaagattcacatactattgttttagtaattacccttgaaataaagtcacatatacttttaagtctaaagttaatccaggacaggtgcggtggctcacacccataatcccagtactttgggaggccaagttgggcggattgcttgagcccaggagttcgagaccagcctgggcaatgtggcgaaaccctgcctctactaaaaataaaaaaattagctgggtgtggtggcatgcacctgtattcctagctacttgggaggctgaggcaggaggatggattgagcctggaaggcagaggttgcagtgagccatgatggcaccactgtactccagcctgagcagcagagcaaaaccctgtcttaaaaaaaaaaaaaaatccatagcctaaccaccttggataatacaagtgactaccctatatctgatcatactgccaccccaacctaaatccagtatttgttttgccttttttttttttgagacagggcctccctctgtcactcaggttgaagttcagtggtgcgatattggctcactgcagcctcaacttcacaggcttaagtgatcctccccacttagcctcctaagtattaggcatgaagcaccacgcttggctaatttaaaaaatttctatttttgtagagacagggtctccctatgttgcccaggctggtgttgaattcctgggctaaagtgatcctttccacctcagcctctgaaagtgctgggattataggcataagccactggtgcccagcctattttacctttttttttttttttttttgaggggggagggcagatggtcttttagatttacctatgtatttgacaatttgtttgttcatatttctttcttgtgtctcagaccttccttcaggtttgacttttctttagaatttccttgagcgagtgcctattggtagtaaatgctcttttttgtttatcatagatgtctttcttttgcccttcatctcaaaaggtagttagctggatacacagttctagggggaaagattttcttctctttgagtcttgtaggtttgttgtgaagattacctgggttcatatctaaagcccttagcactatgcttggcatgtttgctctgtaaataacagtggctgttacattctcagaaaaatactggaacagttggaggcaatgcaggcttggttgggatgtccatactttgactaactttttacattattttcttaaaactttgatttcattgagattggggtgggagtacatttaagcatcaaaactaactttgaagatagatttgattgaactgtgagttctatcactcgctagttgtatatacctttggtagattatcttacctgtcctaagaatcagtttcttcatctatacagtgatcattgtaatacttcctatttctctgagttgctgggaaggttgcatgagaacacatttaaagctcttctccaagcctcacatagtaggtggctagttgtggtaattatttgttgcctgtaaaccacttttatgacttttatgtagagatgttaccaacttgtcttttttattgttgttgttctagctattctgtttttatttgctcttccccagatccacagaaaagatggggtatctcctgcacaattaactttctactctactgatggggaaggccttctgcagagttggtggctcttgcttggaggcaacactttgatgcttgtctttaggtgggaaagtagctttccaggcccagtactttgctacttgtaagactctcacttacctgaaaattgtttgctctggtttttcttgtgactttgggcaagttacctaacctctcagtgcctcagtttcctcatctgtaatatgggaataataatagttccttcctcacagggttgttgtaaagactagatgggttgacacacatgaagacctgagagcatgcatgacacagaggatgtgcttagtactttagcgttcatcagtgttgtcagtagccagggcttccttctgtaccatattgttgactttcagaataaaaaatacattgtttgctatgactttgtcccagggcgtgtgtattaagcttccacatataatttatatcacttattccttaataacattgtcatgggttagatgggacatgtatttttttcaactttattttttacatacaataaagtgcatcgatttttaagtgtacagttttatgactttgagctacagtcaccactgctatcaagatataggatatttctgtcaccgtaaaaattcccttatctctttcccagtcagtctgtcattcttacatttggccccaggcaaccactgatctgcttcctgtcattatagagttttcttatttagagttttatataaatggaattacattttacacactctcttatgtctggcctattcactcagcataattattttaaattttatctacctacctgcatagtacctatattttgagataggatcttgctctgtcacccaagctggagtacagtagaacgatcatagctcactataacttggaactcctgggctcaagcaacttctcccatctcagcctcctgagtagctgggactgtaggcatgtgccaccttgctaggctaattaacatttttttttttggtagagactgggtgtagctgtgtttctcaggctggttttgaactcctagtgttaattgaggcctcagcctctcaaagtactgggattataggcatgaaccaccacgcctggccagcgtaattattctgaggttcattcatgttggcatgtatcaggaggctggtcatttttcttgctctgtggtattccactgttgaatgtactacagtgtgtttagccgttctgctggcgatggcttttgggttgtttccaatttggggctgctataagtgagctgctatgaacatttatgtacaaatctttgtgcagctatgttttcatctattttgagtaaatatctaggagtagaacttctgcatcttaaggaatatgtatttttaacccccttttactgatcaggaggaacttagagggttggaactgaccaaggtctcacagccagaaaggtgtcaagcatggaccaacatttgatactccttttctgtttcctcttcaggagtcattctattagaccagtgatttcacacttttagagcaccaagactctttttaaaataaaatactgtaggtccaggtgtgatggctcatgcctgtaatcttagcactttgggaggctgaggtaggagtattgcttgagctcaggacttggataccagtctggactacaaatcaagactccccacactacaaaaaaaaaaaaaaaaattagccgatgtggtggcatatgcctgtagtccctgttatctggggatgctgaggatcacttgagcccaggaggtgaaggctgcagtgagctataatcacaccgctgcactccagcctaggtgacagagtgagaccttatctctaaaaaataaaagataaaatattgcttagaatttctataaacaagctacacaaaagcactgtaaacaggctccttagaaagttcagtcacttttttgctgttatcctgttgtgcacccaagtgcttctcaaggaatgtcttttttgcaaagtgctgcagtccatttggctgcttcttgagaggagagtcgtggaccccctgaggcctagttcttaaacatctcttcttagtccccattgcattagttgtttcagaacaggtcattgagcatttcgcctttgcattttggtggttcagagagtaagaaactctttctccggctgaccaaaaaaccacctctccctacgcctcgtgtatagattgggctgtacaactggtgagaatagtaacatcaccatccctgttgctataaatcactgctggtgatatagctccttgatccaaagggtacttcgggggatgtagggccagataggtacattcaaactcagactatttacctttgtcacctggtaatatttacagatggagcagatgccagtatgttccattgccctattctggagtagtgattctcattttatgttatcagagcctagcttatgaaatttgaaatgcacttttgcctcctttgcactgttaccactgcatcagagcattttaatcagcttgctttcgttgaagtgtacaatttttcttctcattacgtctgcaagctctcaagtttacagacatgatctccttggctagactaatattacttggccattcttgcatgcaaatttaaaatttaatatcttgctgcaggtctgttgagttttatgcaaattccaatatagattatattttggagctgtaaattagaaattacatttgggggaagtaatatttgtgtgggtttaaaaaaagtaatcttgcagtttgtatggtacatggcatttcttctgaagaaacgggattttgagtattctgtgtgggtttagtagatgtcttgccaattgtgttactgataatgaaaatacaaaaacaatgccagtatgtacattaaatttttttccttaggagacaaagtctcactcttttgcccaggctgaaatgcaggagcacgatcatagctcactgcagccttgagctcctgggctcaagtgatcctcctgcctcaacttcttgagtggctgaaactacaggcgtgcctcgctaattaaaagaatttttttttttttaatttagagacacggtctccctatgttaccaaggctgatcttgaaatcctggcctcaagcaatcctcctgccctagcctcccaaagtactgggattatagggcatgaatcactgtgcctggcctacatcaacattttttatgacatttggctgctttttctaagttatttgggattaactgtgttctctcatttattaattcattgagtatatggttatggatgcttgataggctctcctcttggctttgatgatacagcaacaaacaaaacaggctctgtgctcatgaaacttaccttctacttgggagaaacagacttcaagcaaataaacaccaagtaaatatttggtatctctgatggtgatacattctgtggagggaaataattcagggtgtaggaataaaggtgtgctgagatggaggtgctagtcatcaggaaagacctctctaaggttacctttatgcaaagacttgaagagggaatggaatgagctgcgcaactcttcttaggagaacattagtctgggtggagacactgcaaggtacaagtgtcctaagtgggtgctcttgccgtgtttgaggagtagcaaggacgtcagcctgactagagcagagagggaggtagaaatagggcagaggaggggtagcagatgatggagaggtgtcacaggtcatataggaccttgtaggtactataaggactttggcctgtgctctgaatgaggtggggcactgtgggcgagggctgtattaggtaagaagactctgaccattgtgttgagaatggagtttgtggggggaaactcagatctttggatgatgggcatgggacaccatcatcagccattgcaggtgtggaccttggatgctgcctgcctaaggctggtgaccaaaaagaaggtagagttggatacaagagcctggcattgttggcatttttgtgtttgagtgtcggaaagatcgtggcagaagcctaagtatctgtgttgcttgggcctagcatctgtgttttcacaaatcccccaggtgatttgatgcctctttaaaacacagaatgttgggccctacccaaagggtttctgattcaggaggtttagggcagggcccaagaatttgcattatttacaaatgtcaaggcgatgccagccagtgctgctggtcagggaccacgctttgagaaccactgctctggtgaatgggtattgctgtgttgttatctgcaaagttacctttgtgtacttctgctttacaaaataggatgtagcttgaactctgagtcaaactgccatttactgtggtatgaccttggatatggcatatacagtgattcctcacacatggtgttaataagttcttagtaaatgctggctatttgaatatggtatgtaggtataaaatgatgtggtggaggtaaaatatgaataatttgctgaatataagctctggactgtggacattataaacaagatcttgttttgttttcagcatgacatgaaaggttcattagctttgttttacacatagggaagtggcttattcatgatcacgcaactagaagtagcaacggtagatttcaaattcagttctttctggcttcaaagcctgagatttgccaccaccgcatgagctgcttggagtactggattggctctcccacagtttttgtcattgtgtgtgtgtatgtgtgtgtgtgtatatgtatgtgtgtgacagacagagagaaggagaggggtgtgtgtgtgtgtgtgtgtgtgtgtgtgtgtatgagagagagagagaaagtgtgccagaaattatttgcgtacgttttaaaatctctgttaggccattttttaaatctgtaaaatgggcatgaagcatgcagagttcatagggtttctttgctgagtagaatatgggatggcttagcattgtattttttttccttttctaattaaaaaaatttcaaagccaaatcgaatctagatagaataaatttatggattttttctttagggttccttattagaatggattcttcctaatatgaaacttgagttattgaattttgtgtggagaggatgcttctcattagggtctcagtttgggaagaagagattatgttccctttaaaaacagcttactgtgtttgcaattttagatttcttatctcaggaagttcacatactgttaggataaaactttcctagataaggcatctgtacaaaggaatgaagtatatgggaaactgcgtgtgtggggagaccatatctttaatttttgaaagggctagggtagcctggtggtttggaaaaattaaaagtattgcataaaagtcaaatgtaatagcaattattgttagtgttgtaaacttccacttatccacaaatcagatgggtggcagtctctttatcttaagttctggttataaaattgaaaaagccattgattaacaaatagctgtcacaaagctggaactttcatagtaacagtttctggtgaagcttcccttgatccctgactcaatcagctaggtagagataaaagagaaattttgtattctgaagatgtacagacaattataaggaactctggttgactgcagggggaagagacacaatagctattaaaataaaagtatgacagttgggctaaacaggcagcctcaaacatcctaggagtccctgagggcaacactgtatgtagtgactcaggttcttagaggaaagtgggtcatcaacaagaagcatacaggcttgtttttggtatctttataagaatagagggaaataatgagtgtgtcagagagctcttgtcaagtttagtttcaataaaacaatttgcttaggggtaagtttatttgggaaaataaatcactgataacagcataaatactgtgttcctcagtgatgagattagatgagtagggaggtagtggggtgaggtagaaggagcatggacttggacacagatacttgattagaagcagaatcaccttagatatctctgcgccccagcttctctgtctataaattgggaataatacctgaagaggtcattgtcaggattgaatgagatgatgtaagcagtgcaccttgcccagggcttaataaatagtgatgagactggtagatttctctgtgagggggcttcaggatatacctcccttatacagacttctattcctttgagtccaccgccccccacaacatctttatgaactgtaatgtatctcatactgtacaagtcacccatttaaagtgtacacttcagtggcttttagatttacagagttgtgcaaccactaccacagtcagttttagaaaatgttcatctcctcgaaaagaaatctgtaccctttagttatcattactttattccctcatcctcttcctcatcagatgttgtaggcaccacctttcttcccttccttcccttatcttcttttcagctgtggactgtgctgatttgcctgttgctggatcatgtgattgaaattctttgaatttttctgtaaatagccaatttagctttttcccttccagagtatttgtttctttgggtgtggaagcagctgctgcagccagtgcaagggctcaccattttgcgctttgcggctgttcatatggcaactttattcaaaaccgctcctgcactgcttaagttatttgttttatacaaaaacagttctcgctggcttgcggcttctctgctgccatgttgacaaatgttgcttctagtgaaatacacaaaaataaataacagcaagggagaggggagcacagagctaagtgaattcattttgcctcttgagtgccattctcatttgttttaaaaaccaccctggcacagacagaaaaggagaaggcagagaaccgcaggaaaagaaaaggccacatttgattctttgaattgggctgtaggggctggctgaacagacaacttgagaagtatctggaatgtaggccctggggatgaggaaaagtttacaaggaatctgaataacctgcagatattcatattgcaacagcccccatttacatagtcttcagagttcatttggtatgttctcttgttttctcgttctgttgatgacgagactcaaatttaagcactgctggtgtagtagtacatgaccatggttggtttctgtcagtgtggtaggttgtgtattaggaactggaaaaaggcaaaagcgtaagggtgtgtgggttctcaagtttcgatttgaaggtctgacccacatgagaaggtggagggaatgctgacaaatattgattgcctttctgagccaagtatttccacaaatactatgttattagtattattattatattaagatatattagtattatactattatattagtatatattagtattattagtagtattatattagtatattagtattattatttgtatataacaaatactatgttagtagtagtagtagtagtagtagtagtagcagtagtagtagtagttttcagagagagggtctcccaggctggagtgcagtggtgagatcataactcactgtagcctcaaactcttgggcttaagtgatcctcctcacttagcctcccaagtagctagacccacaggcatgagccaccatactcagctaatttttagattttttgtaaagatctgggccttacaaagtgctgggtttataggcatgagccaccaggcctgacttcagaaacattgtttcattggttagcatgacaaaggttggtggtcttagcttcatttcacagactagggaggacagagttttgaggaattgtggtacttacttgccaaaggtcttactgaaattaggggagtggaatgaaatggaaaccccgtgcttccagacctagaacttgttccttttctatattagtagtaagccatcagaggtatggaagaagaaaaggagaagggcattggaaaataaggagggataacagcaagcagtagaggccaaaaacattttgtttagaaaaattgtacatcttctttgaaggtttttgttcattaaaaatcaccaggaaaacgaaagtgacttgcaagtccacaagaaactttgttttgggtgtgtgagttaagaatgatcacctgaccaattattattgactagaaaaacatttccctgagcctttcataaattatcttaatgtgcatattgttgaggcagtgtctgataaataacagcctaattggccacccagggtctgagaggtttgcttagccacaactagcctttcattctgggtctggcagattgatttctttccatttgttgcatgattttcaatgctatttatgacctaaatattctgttcaaaatattttttttttggtctattgctaatagtagatgcctctagggagaagaggagagaagcaagagtgaggtgacagggacttacttttccttatattctccttggtactttttgaattttgttccgtgtactattccatatgatggaaaggaggtaagtgtatttaggcaggtggaaggtaagaagggtagatgaaaggatgaattattgacctgaacttcaggcctttattcatcagtggtttagcctgtgggattgtttctcagcatataaacttcttcagttatgtagacatataatagttacttgttcgatttattgcatctgcaaaggtatggccaggtgtcatcatgaggaagtatagtagtatagtgtttaggcttaaaagattctgaaacctagacttcctgggttgtaatcctttctctaccacttagtggctgaacgtgaccttggatcttactttatctagcatttttgtgtctcggatagcttgtagttaaaatagtagttataacaaaacttgtggaattggaaggattacatatattacttaatccacatgaagttcttataatagtgcccaatacacagtactcactaaaagttaaatttttttttgatgactattatcacagatggtgatttgcctcatccatctctctgtcccttaatgtggtccaaaatccaccccccgccccacacccggccttaatgcccagacagtgcccctgtactgactaaggagcctttcttttgagttcactggtctggcactggctcctagaagtgctgttttccagtgacagcaggatatttggaccactgggagagtcagtgggctggggtgggcccttgctctctgcagaggtgttctttctcccagtgggaggaaacaccacttgtcagaacacagctttggcttgcccaggttcctgttgtgcagatggggcctagagtctctctgggccccttgtcatggatccaagccaaggctgtcgcttgctgagccaggaataatataggaattagtctttttcttctttatactaagcactaatcaatctacagttaactctgtatctaatttctgaaccagatgccgtgaataactgcccctgaatgtgtttttgccaataaaaggataagtttaaggcttttaatcaatgccgcttgcactcagtatttaaggtcagaatcttgtgtgcgacttattttgatcaggataattgttgggttaaaaaatgaacggtttttgaaattgtgacactcgcggttgactcgtgggtgaattaatctttgagaggatggaaaattgtcgagttcataagagttctcttgctctctagttgtctttcaggtcacttatggaaaaatatgacttttaggaggaaggcattctttttcaatgggaaaggagataagagactaatagaaatttctaaggagtcagtgatggaggctcaggggaaattggaaatgaagctgggtgttttggatctgcggtgagctgagggactggaacagcagctgtgtatgttctaggtaatattaacttgttgtaattttatgtctccagcatacctttttcaaaggaactcatgtttcctgaccaacgactgtgtactgtctagaatgaagcatagtgtttagaaacatctggggtttagatattggcttcactgaatggcctagggcaagtcactgagcctctgtgccctcagtttttataattataaaatgggatggtaatagctacctcgcagttggaaaacttaaatgtgatcatgtatgtgagaatgtgaagtgcagtgcctggcacacaagaggtgctgaaaggagcatctccttttacttctttgtggagtttgtttggctggtctgctggtctgtcatacatttgtctggtgtgcctctagatacacgtaatgtggaaatttccctaccttgtaacagtgagttggaaattgttcctgttgatctgtttttttttttcttttgtgcttagggaaaggcatgagaaaaatgagtcaggatgccctccatttctggagaagcttggtggtaattctgttccccagtggctcacaagcctgggcagttcagagaatatgagaattggtagatcatggagaactaggctctgcccctttggctatgcgggagttacttagtcttcctgaagtttcctgtccatgaaaaggggatgtgtgagggtgcaatatgggtaatgtttgtgaacaacctttgttagtgtcaggaaagtccaaaactatgtggtgtggtattttcatcatcttgagttgacaacagtgcttatccaaaagtcaattttggtattttgtcaaatgttaaaggctcaggaaataacttccaactcaaggaagatttgtatccactctggagctggaggagcttatattaagaatgtaagatacttgggctcccaggatttctggaagagctggcagtctccctgaggttcaggttctcagaccagcaggccatgcatgggggcttgtgattaagctggtgccgaacattgctgaattatataggtctttctgtgctacaggttggttttctgctgttcacatgtagtctaacagtggcctgttttcctttgcctcaactgtgacatcccctcgaagtgacctttatgaaggcagagcttggatctgccttgcttcttgctgcctactgtgtggttttgtgcagagtgctcctttccctcctctggtgtcttcacaggtgactcaactggaagaggaggttaaagaaggtcgggttaccaagcacctctcttcatgcctcagccaatccaggccccaacactgtgtgggaagaggtgttcatctgttgagaaggggtggggacaacatatgttacatacagaggctccaaggtggttttgatgagcatagagtatagtgggagaaggagcaaaggatggtttgggaggtaggaagtaaaagtttcagctagagctgactgtcaaaggccttttctgtctttagacttttactctgtaagatacagggatttgtatgtgaggcttttgactttaactctgttggaatagggatttgttgcaggctgttaagtagggaggatggtatgagagatgcattttcaggggtttcatttgctcatggcatggtagaagatgaagggtggatggtgagtagagtagaaataggaacacagaagactgctgcagtatttcagatggggattgtgtggggcctatttaggtcatctccagtgcaggtgcccaggagaagttacagtagatactgttgtacttgtaaaggaaaatgacattcgagttcctgttttgtgccaggaactttaagtaatctgcatatcttagctcatctcattctcaaaacagcaacaagcggaaggtgttatttctcaccgtttttcaaataaagaaacttaggtttagagcataagtaatttgtttgccatccctggacagctcctaaattgcagggttgaggttaatacctgattacatccaactccaagtcctttctgttcgcattacaccacactgtggccctcaggacacagcctcatgtagtgattttgcattagcaaataactttgtaaggactagtctgttaatagtgatctctttcaacattcccatgagatgagggagcacaattaattgttcagctgagggattagagatataaggaggttaagtgacttgacgaggtcacccatcaagtggtttggggcggacaggcagaggtgagtgaggcttggagctggccattttgagacagtggccttatcgagaacaagaattttccagcctcattttataaatccaggcttctagttctatagactagggaaactatcatggaaatggtatgcaaggcaagtgcctgaggctgagatggcacaaagcaccgtggtatcttggggttactttataatcaaactctctcttctagcatagtctttaattaaaacaacaatcatctccaccaaaaactaatcatctttattaagcatacagattggaggaagagtggggagtcttgtgtctgagaaagatctcaccaataaattgtttcctttgccataataattgtgttgctgagtttaataattagaattctcactctacgcttcctttttctgtttgattttacgggtctgacatcgctgttgtttttcctgggaatacttgaggtgtcacaaagagcaacattatgatgagagccatgggaaacacttgctaattacagtatattgtgcccctgttccttatctatcagtctctattggttattattactcatttaatttttatttttgagagatgaatgcacagggcagaataggtcctgagaatgaatctagagctttgcctttgacttggatggacactttgggcatgtacgggtcaagaaatagatgattgggtatcttgtggtaggagctagaggaactattaatacatttgggagtggggagtgaaggccatggactgaaaagatgccgaactacaaacctgaatgattttatagtttgctaatggttatccctggatgccatgcaccatcatgatttaactgagccttgcaaacagggacgatacttttcctaaccccctgccatctactgctttctcaccagaggtcacagggcaaagacaagtaacactggcattgtgcatgtgtgacaggtaactgtaggtagtaaagtggccacctgtaccattgcaaccctgtgtaatagtctagtgaagtgatctgctttctgcagtcaggatgccaaatacggtggagaaggaagtgacagtcatttacagtgtcatgtttagtcttttgcagatgtgcttacagttttaacaaaggcggagaagaaattatagggtgggaaagaaatgcctacagacaggctgctaaagcctaagaaggaggaaactagtatttgtgtgttttaggaatgctaagcccttgcttacatatcagcaagcaaaatattggcattcacttctgacttgaggaaggcatctctgaagtcaatagaaggaaatgcctaaacacaggcctcactcagaaagaaaggagagctgtggaaatactcaggattatctcataaaagctctttgtgtatttgaagcctctaatgaaatcagccttgttctccaggccagacaactccagttgttcttacctttctttattgtatcttttttttttcatttcttttatgcttttgtcatctcttgaaatttcttttctttgaataataccaataaaaattgaactttttgcctgaatgcagggatgacttgctagtaactaccagtttttatcagaaagcagagtgggatgctcagtgatgttgttgatggtgaggatgtccaaatcttctttttatatgctagctccattgtctgctgcatttacctgtttgtagcgttggtgcgtggaacattggggcatataaatgtttattgaattagtgaatgaagatatactgaattttttccttaaaaagtcagtatttgctttgggtcaataaagaaaccctttattttgctttttcttcataaacaccaaaatcctaggaaatattggttttactttgccacagcactctgcagcttgtacagacttttccagagatgaaaaattctttctcacttctgtattagtccttcgctttatcctctgattcctccttccttccttcccttttctgccttcctctcacccattcatgtattcattaattcagtaaatgcttcttcaacctctgctataagcactattttaagttctagggatattgttataagccaaataatgtctctgctttcatgaagcttatatttgggtggtgggtcaaggaacatgattgatcagaagaagttagatttccctgttgggacaaggctttcagagaagtaagtggttgtataggtagtagagataaaaggattgctccctgtgagggacttgctggcaggataggctgtgatttcactttattttctatttacataacaatctgaatcccaatatagtgtttaacctgatatgtaagattctgtttgggcagggttttgtcagttatcatttatatctcctttcttgaaattagatcagattcctttgatttatttggagagaaaaatgggcaatacacaatgtgtttctgctgaatattttgctatgatgttgacacagtaatgtacactttattttgattttagtgtgttttatttaaacattccattattcagaaattgttaccccctccttgttattactgtttgcctgcagttatttagaaagcagtttaattaatgttcttttaccgccccctgcttcagtatgagtttcaacacttttaatacaaagtgttcatatcactgtatgaacttactaaaacccaggacagtgatattcattcattcattgctttatccagcaaatgtgcaatacaaaaaaagatacatgcttcctctctacacatttcagtctaatatgaactgtttggttgaaatacagaaacataacatgcaattctctgggataaacgtttcactaaataaacagcagtgagaattctgaagatacacttaactaggtcagcctaggcttatcagagaaggcttcacagcataggcgatctttgatctggttcttgaagggtaaggatgtgttttccccccagggaccagttgagaaatagctagaattaattagttctgctgtaatcattgaggtgctgatcctagagtgtggcttccactgcagtactggatgtggggatgatgatctcattgcaaacacagcctgggtgggtgtttttggttttgttttaaggattctgaagcagcatatacacaaggttgacctcaggacctctttagttggttgctgctgctgttcacaatagatttagattggatagggcttcagttttcttactgttgcattccagcattttggatcagtcactttattacatcatttactttctggcttaggcttagttgttattaagtgaatcagggataaaccttaggctactctcctgcttcctttttcaaatgatccggagtaaataaaacaactacatctctttcgtcactgtgtttcgttcccatctcagaacgggtaaaatggccaatattttcagtgaaaatgtattgaaatgcatttcactgaaagaaatgttcacattcagtgaaatgtatctaaactctaaaaagagtctagaaaagctcattgacacatttgttacttgctgaaagccccagtgaattttccaacctccgtattgtccttaaaaattgccttttagttcttaaggtggtggaggtgtgtttttttcttcccccttaaaccctcttctgagcaatctttgcagagacacctggtgagagagtaggcccttctgctttgtgtgccctctagtaagagatgatcatcagcagctttatatcctaatgtagaaaatgtgctgtgctagatcatttcaacccagcaactcacctcttcatgcctaatgcctggagctagggccttgtttctctctacattagacaaaaaataaataaataaatgtgggtgaggataataataattatgatggcaggaacacttattgagtaagcaagtgtttgcttatttaatctacctgacaaccctaccagatgtaggtactgttattttctccatttggtggataagaaaactgagtcacagagagactcggtaatttgcccaaggtcagacagctgtctgcccggggaacctatacacttaattgctctgctgtactgtggttgagtatctcttatccgaattgcttgggaccagaagtggttcaggtttttgattttttttttccgagtttgaaacatctgtatctacataatgggatatcttggtggtgggacttaagtctaaacacaaaattcatttatgcctcatacacgtagctggaaggtaattttataaaatacctttaatgattttgtgtgtgaaacaaagttttgactgtgttttgactgcagctgctcatgtgagtccagtgtagaatttttcacttgtggtatcataaaagtttcagattttggagcatttcagacttcagattttcggattagggttgtgcaacctgtacttcatgagccaattgagaaaaatgccttcataatttctttctagggcctcaaacgcctggacgtcacccctgactattgcatgttgtgcattggacagttagatctcctcagtgcctgtgaacaagtgttcttttgagtgatactcttctttttgtgactgtattatataatatagctttcatagcccccactttatttgctgttattttattcccctctcatccccgcccccccccccccccccccatataaaggactcatttcaaagatgggcgaacctggaagctgaacctgactctactcttcatgtcttcaatttactggccataaaggttcagttttgtatgggatcttctgtcctctagaagatcccgtacaaatagaggctttaatttatgcttgcattcttgcattttgtgtgatttattgcctaataaatgaaagaaaaaagtttatttagatagtaaactgaaaatgaaaaaccatttttttccacgaacttgctaattttcttccattgtatagtatgaactcaatctacaaagatctggcaaaaaaaacaagtatcatgttctgtaacaaactcagttacactaacaccagaacttactgagtttaattggagataattaaaaaaaaaaagttctttttttctttttttttttttttttaaatagagatagggttttccatgttgacctggccgatctcaaactcctggcctcaagcgatcctcccatctcagcctcccaatgtgctaggattgcaggtgtgagtcatcgcacctggcctcttaatgtagatgattttttaaaatgaagatttttttcatagtaagaaaagggaaaccataattccagaccacagagaaggacttctttaatatatttaacctctttatttacagatcacttctttctagagagactaaaattagggcagagaaacctaaatcctacatacaaagagctgctgcccattcaaaataattacaagtgtgtcgggcgcggtggctcacgcctgtaatcctagcactttgggaggccaaggcagtggatcatgaggtcaggagtttgagaccagcctgaccaacatggtgaaaccccgtctctactaaaaatacaaaaattagctgggcgtggtggcacaagtctgtaatcccagctactcaggaggctgaggcaggagaatgcttgaacttgggaggtggaggttgcagtgagccgagatcgtgccactgcactccagcctgggcaagagagcaagactccgtctcaaaaaataataataataattataagtgacagtaaagcatctccccacataatcctgtatatcagtaagaaaatatgttttgagattcacaaaactcaatttacgaatctctggttgtagttatttgacttaatatataagacacttaccagaggagatggttgcaaacagatttgatgacaggtaaatttttctaaaggtctgctaacttcttattcagtcatggccaaccactgatacaatgctgagagttgctttctcctttcccctctactagcttggggtccacagaccaaaaaaatctataacttgcaaggctaataaatgcatgcttcagctgcctggaaatgctgttggactggcaatttgctgccccgctctaatagagactgcctcagatctggtctttaacctggattagctggataaagagaatcctctgggatcctgtgtgccatcacctgttagtgtgtttgctgtataaatgtaacatccactaactttgtcagatgatgtctggcctggctgctgtggctgtgattggaattgaaacatacagcttgttattaaggtagtgactggctgtgggggacaccgacgtctgttgtttttcattgttgatctagtgagttagaatgcctttcctgggctgttaatgttaaatagttcagtcctgttagtcgttttgtgagatcatctttctgtgtgatttgtgtgtatttccttgatctagtggggtgcagggtcagggactgaggggaaggtataattgtttacagaaaatgtgacaggacatggatttgaaatcagataggaagttaaggaatgccgggctcctctgaatattaaggaaaatctttaagcccctaattaacttcagaaaatccccttgctctcacagatgggaatttggctgggtaagctaataactggaatgaaggctaggagttgtgggttaagtttctccctggcaaataccaatatttcaggattacttcgactcttgtcctgctgcctcccactggatctttacaaactctgtgcagtagagattatcttgataaagattttggatgcatgttgggcctttattgaatgatgaatgctgttttttattcatttgcacatttattgggtacctactatatgtcagcctctgttcttggtcttgtatggtggtatacaagagaaacaaaattcttagccttatggaatttatatcctagtggactataaattacaatgttcactatttgagaggacccaagcttcagatgttgtggctgtttggcacactggtccgggttgaaagaagagactgggattcaagttgtagttcctgtcctgatttctctgggcctgagtttaactaccggtaacataatgacattgggctgtatctaattatttatagggttctttccagttctttcacttatgatcctgattttcccaaacattttagccaagttgtctttttttttttttttttttttttttttttttgagatggggtatcacccagtcacccaggttggagtgcaatggcactatctcggttcactgcagcctctgcctccctggctccagtgatccttccacctcagcctcccaggtagctgggaccacaggtatgtgccaccacgcctggctaatttttttgtgtttttgatagagatggggttttgccatgttgcccaagctggtctcaaacttctaagctcaagccatctgcccgcttcggcctcccaaagtgctgggatttcaggtgcgagccattatgcctaaacagcccagttgtctttaatctagttgggcttctggctaattcgtgttggtgaccaatgtttgcatattaaatcaaacaatcagttattgtactggagaagaaaataattgtttctaaaaagttcatatttcgactacatggtcatgccatttaaaaaaaagtagtaaagcaacaataaggaaatactcttttattctggaatgacatacctacctgaaatctttgagtttcccttgtgtcatgtgagctggttgattacaggtgaggagaattgcatgttcttacatgctcctcagaaacactcatcactgtgtaaaaaatgcttttttgtttgtgtgaaatcataatatagagcccattccaccatacaccttcatcatcaagctcggggatacaagcctgttaatcaagtgggaatacaggaagtgagacatgaaacactggttttattttcacacctctaaatgagtgactgcagaggatgaacttaaaaataataatgccacctcatacttgcatcacaccttttaataaggcggtttaaaaatatttagggtgaaccttcatcaggatgctttaattgcctcagcatagttgaatagtacattagggtaatgcctctgctgtgctgaaaagcctggagggagatactgtcactcaatgatgcgttgaggatgattaggtagaaccccttcagatcttgggatctcagtttcctctcaaatgcatgctgtgggtagagaagcctgggctggtgtgtgtataatttacatctgttataagtgactaaacttgtaagaacgggtacacaaggcatctttagtaagaagtaataatatctgccttagtaataatatcttctcattcttgtaggtccatttgaaatggctccatctctagtacatctttcctgactactcccacctggccatcatatcatctttctccattagatttcaggcagactagaccgagactgtgggtttttatcctgttagccacttagaggctgtttgatcttgggaagattacttgcttttctgtacaaagtatctttatttctgcatctgtaaagtgaagataagaatccctacttcatagggtgttagtgatatgagttagtaaacatgatgcccttagaacagtgcttggcatgtgctgctgtggttttgtcatcattattactccacttcttccttggtacatagctcatgttctccttaactatacggatgtatttagcgatctgccttaaattgtgatgtgttccttctggtctgagagcccttgtcacacataacatgataactttgacttggtaggtacctagtgagcatcttggattgagctcctacaggatttagttaagaattcaaagcagggtgtattctcattctgacttttaaagcctttgaggtcagttgggggcaggtcttatttgtttcttaactggtgaagctgccataccaaggccacttgcccatgatcgtctactgggtagcctgataagaaggtcagttactcaaggctgtggactcgattccattcttgctgatattactagcgtaaatgagatgcttttggataattctctgagcaatttaggccaggtgaatactggacagtaatttcctgaagtgccatgaagtggcaggaacatgatttatgtaacatgggctcttgctagctgggatgaacactggagcccctgccgtgctctggaattatgagtgcctgccagagtgcctgcctgcttttgttctagagagtttttttttttttctttttcctttaagttaaattctcaagttgcgggcaggggcgcaggtctctatggtgatgaatggagagatgttgaactggctggttgcaaaccttaccctagcagttcttagagacaactgggataaggacattttagctggttgacacttgggttgaaagtactgatgtaaaaaaaaaaagtgatgtgtgtatggggagggacatatacaaagaagtagtaccttggcattctagccagataaaggagatctgtgttttttaaggtaggagctttgagaaaaatgcaaaacttgtatatttcagcatgcagaaaattgcacttcactatcaggcaaacctcattcatattagcaagagaagtatatgagaagcatgtggttgtgggatgccattatcaggaagttgctgtgttcttgaccttgggctctggaagaacaattagccccttgcatgcaaacttgctcagtaaagaaaaagttttggccctaaggcctgtggaaccaggcttaggatggatgatgggtttattgtccttcacagccaaaacacaacagtctttctccctttctttccaggctacccacgtgagtacgttgataatatttctgagagttttaaagaattttccagcagaatgagagaagatagaaggaccatcttgataatttaaggacatgctcttatctcttgatctgctgcattttgtttttgcttctgtttaggccagtgttggtagttatattgtcttctctccactgggcggattacatgtagcaatccaaaattgtcaacataattattccacttcttctttggcacatagctcatgttctacttaactgtactaaattgtgatgggttccttctggtcaagagcccttatcacacctaacaggacacattggacatggtaggtacctagtgagcatcttggattgagttcctccagaatgttgttaagaattcaaagcgggtgtattctcattctgacttttaaagcctttgaggtcagatgggggcaggtctcatttgttttggattacatgtatgcaatccaaaagagttaggttttttaaaaaaattaattacccccaccccttttgttaaagagtcagggtctcactgtgttgcccaggttggtcttaaactcctggcctcaagtggtcctcctgccttgacctcccaaaatgttgggatcacaggcgtgagccactgcgttcagtctaatttttatttaaaatttaaaatttaaaatttgtggtatagtccgggcacggtggctcatgcctgtaatcctagcattttgggagtccgaagcgggaggattgcttgagctcaggagtttgagaccagcctgggcaacatggcaaaaccccatgtctacaaaaaatacaaagaaaaaaaattatctgggcatggtggcacgtgcctgtagtcccaggtactttcggggctgaggcaggaggatcgcttgagcccaggaggacaaggctgcagtgaggtgagatcatgccactgcattccagcctggctggcaaagtgagaccctgtctcaaaaaaagaattaaaatttgtggtacaatataaataacataaaatttaccatgtacagttcaacagtgttaactatatttacatcattgtgcaaccaatctccagaactctccgtcttgcaaaactgaaactgtctaccattaaataacaaccgcccattctctgttcttcttagcttcctggaaaccaccattctggtttttatctctatgaatttgattactctaagtatctcatataactggaatcatatagtgtttgtctttttgtgactagtttattttacttaacataccctcaaggttcattcatgttgtagtatgtatgtatcagtatgttcttcctttttaaggctaatattccattgtatgtgtataccacattttgcttattcattcattcctcagtctacatttgggttgcttccactcttggctgttacaaataatgctgccataaacatgggtgtgcaaatatgttcttgagaaccccctttaaattattttgaatatatacccaaagtggaattactggatcatatggtaattctatttttatttttttgagaaactaccgtactgttttccataagcagctagatttttaagaagtacatttaaattcatcgttttgggccttggtctccacgctgccttgagttgtccctaggtaagtgaagttctcagtcagtcacctgctctggcatacctctgagctttgacacacctcagccactttccatggctcactttggccctttgtaggttggtgcctctcattagattcaacgaacaatttctcaggatctgggcctaaccagtggtgttgaatcttagaaagactgagctgaaatgctcatcagctggtgccatgcttctcactttaggttatacctccagttgtgtttggataagagttggagtggcatgacagtctcccacagaatctgaaaatatagttccagatgtgcttctcccaaacttcttctctgccattggggttgcaccactggaaaagtgtgtgaagcaatacttcactctgacaccctgctactatatgcttgaggaagaactgaagactgtatcatggaatgagctgcccataggtcgcgcatgtgcgcacgtttgtacgtgtgtgtgttgagatgggagagggaatctagggatccttctatactccattgattatgctaacatggatcttatttaatattacaaggacatttctttgtcatcgtctttttttttttttgagacagagtcttgctctgtcacccaggctggagtgcagtggcgtgatcatggctcactgcagcctcgacctgctaggctcaagtgatcctcccacctcagcctctcaagtagggactataggcacacacaaccatgcctggctaatttttctattttttgtagggacaaggtttcaccatgttgcccaggctggactcaaactactgagctcaagtgatccacctgccttggccccatcaaagtgctaagattatagagacgtgagccaccagcctaaaaagacatttctaattagaaagtgtagtgtgaacttttgccgtagttggacttctctccatgtgggcccttaaacactgatatctcagtcatatgaagctatcaaggaccaaaataagggggcatttgccttttctgtcagtgcagaaccaataggggccaggccaggtatgaccaacccattgtatgtgcagtggcttgctccatctttctgtctctggtttatgtatgtgatcatttgcggattccagcaggtacatcctctccaataccttacctggtaagctgtctagtaaggtttatatttcagaccattgggggatccccctcttcatggcacacactgtgcctgttgcctaatattcctttattgtctgcagcatccaggaccaatttaaatgtcactttgtgaaacttcctcagaccctcctctagagcaagttagtcactgcctcttctgtgccttgctttgaggttattgtcatcactgaacctgacccagtgtattgtaattacttcagacggtctctcccaccagagtttatcctcctctgtgcaagtgctattttttagtcctatctgtctaccttagaaccttctgcagtatttggtgtattgttctgtctgtggcaattgtctggtaaatgttttatcagacaagtctctgatgcaatgggatggagtggaattaatagttttaatcatgaccatggcccgaaatagccgtttgacaacatccaagccactcactctctcagactctcacgctgggttgtgtaaattgaattctttcaaatgagcataagttaaaaaatacttagcacttaccatgtgctaggtactttgtaattaagcattttacttacataaactcatttaattttacaataacctagtggagtacatttcagtttcatagatagtgaaaaagacacacagaacggaggttacctgctcagttcaaaccctggagtgtagcctgtgagtgtatatttctttttgcatgtggttaataaattaatgttgtatttacagctttgcagagctgggatgcccttaacacatgcagctctggacctatataagctgtcaggtgtagaagagtgagcaggaaaaccttgtgggggtaactgattccttgtacaaaagaaccagatttcagttagtgatgaaaatggaggaagtgaagaatccaagtcgaatgatagaaaaggttatgtgtcgttgggcaagggttcaaaagacctagttgtcttgattagagaggaggggagctgagggaaaatgagtcacagaggaggaaataatgaagatgaagtggccagagaagacgggctcctgcaaggaggggcctgggttttagatagcctccaagaaggacaggaagtgtggcctgatgggattagctagtctcaagacaccaggtagaatgcaggccatctttgtagactgggccttggggtgtccaaaccatgaaatgcatggcagagtgtggacacacttgtttgtttatactctttctcccatcctgtacaatgaggcagaacatgaaggaaaaattaacaaacaccccaagtctcctgacacagggatcaaaacatattgatgatgtcttgcaaatctgataatttcattgaaccatgtgaagcttaaaattgatacataggcatacccttaacattaagtgctgctgtcagtctgacatagctggataaaccaatgttgaataatctattaaatatgtcagacttgaacaaagaacgtaaatcatattatattatttcagctgtaattaggtgggagataaaatcacaaatagatgagtttagtgaatatttcttagtgtgtacacagtgtcactggaatttctttccttgctctatgggaagaaagaaattgactgccttccaagtattgactgctgtccaggaagtgggaggttgaagggtgacttatgtaatgttcacagagtgggtttcatttataaattcaatgagattagctacaatcttcctgaagttaatggtgatggaaatgcaccattctgcatttagctggaaatagctagctatccaacttggagacttaattgttcctcagattatgatatgtttgcatttatatctccctcccctcctttcctgggagctggctgctgcctttattgtctagaaattaataatgcagaccagagcttgtgggtgaacagggcgatgtattgccagtcttttgatgttcctgtttcccaacccacggagtaaacttgattattgagaataaacaagggacataaactaaggtggaaaagataaagaaattgcattaggagggtccagtgaactgagctgtagctaagaaatggagataattctagtcattacttcacggggttgttgtgaagggtgaaatatatgttaaaccttcagaacagtgcctgccatgtagcaagtgtttcagtatatatcaggttgctttcattgttataagaaaactaattggcatttgtggtggatggtcagggtggtgtgaatgtgaaattcaagagcataaacatggttgtttcctcccagatggttggtatagtgaaacagacagttaagggtaaggaagtgtaggccctcattggggctacacatcacagcatgctattaatataagcagtgtatactggtcatcttttattgagaggctatggcttttttgtgtgtgtgctggtggtttttaaaatattagtttgattcatttcaggtgattttgttaatctagcaaaacatcttcttgcactttttacattataaatgaggaccatagaactttgtgtggacattgcagtcattcagcagacatttagcaaatgcgtataatgtgtgtgaatatttttttgtatgaaaggttttcgacacctgagactcactaccctcagccctgagttcacatgatgggtcggtggatttccagagaggcaggtggaggcgccgcagtgggagcatcctggctacctgagatgtgttttgaggtgccagcctcttggctccagctggagccaattggcctgttgggcatgagctacatggcatgtagagtgagctacatgacatgtagagtgagctacatggagttagaggtggttatcctacttcttctacatcacaactttgcagagcgcttcatataagacttttgtaaatttcggagatagtgtgctttatatagcaaggatttccagggacctactagaggacaacagaaggctgacatttccccctccaggccagtagcttgtctttcattactttgcataataactacttccgcttgctttttttcccccctcacctcagctgcacttaggaggacttaatgacatcatttaacgttaaggataaatataaaaccgatctgttcatgaacaccagtaaattgcacttaaaaaaaaatggtttcacataaggcagaacaggttgctacttaaaagagttaatggccagttggttttagagtagatcacaaaaagaaatgtgacttcacccgccaactccttagttaaagaaactgtgtgtttgcagtgttggagaaccatggaggaggattcagaactttaggcaggaagaactgtgaatgagtagccctgttattcccctggccactgtgcactcatggcttctgcacattactgtgtaaactcctttctcaccacctaaaacctaccaaagcacccagcgatcttcctgtatgtgaactcacaggtttttcttggataatttgcctttccattgacctactttcaagagcaattttccctatagctttagcaggtaactaaaaaggggagtggtgagaaagtaaatttggagttccaaagggaaattacttggctttgagctacttagtcaaaaacatgtattgcatgcaggtaggtcccaggcacagtgttgaacacgggggtacagaagtgaataaacattgcttctgctgtcaaggagttcacagtctagtgtggaagatctgtgtgcaagtagatggtttcagtgcagcgtggaaacctgcagcagtagaagtgacaaaaggtatgttggtagcacggaagatgcagtgctagttccgtgtggcaaagggtgaaggtgtcttagaggactccttggtcaagaagagtttggaggacaacagggagtttgcctagtagacaataaggcagattactggggcagaggaacagtggtctcttggggagattaggagctgggaatcaaatttcaagatcaggtttttttatttcggttcagtctcatacctgctgcctgtcatgtgaccttttttttttttttgagatagagtttttggtcttgttgcacaggctggagtgcaatggcgcgatctcggctcactgcaacctccacctcctgggttcaagcaattctcctgtctcagcctcccgagtagctgggattacaggcatgcaccaccacgcccaggtaatttttgtgtttttagtagagatggagtttctccatgttgatcaggctggtctcgaactcttgacctcaggtgatctgcctgcctcgccctcccaaagtgctgggagtataggcatgagccaccccacccggcccgtgacctgactttttttactgagaagaaacagaaatggggatccttatgtcttcattccttttgtttggcataggaagctggactgcatccaaaattgttaccttgtgcaatttctggataactgaagcttacacagcctgaagtgtacacaactggttaatgacagatccggttcaactcagaaattcacatttgtccagattcattcagttgccctataatcttaagtgttttttctgatgttggattcattccttctcttacttgttcaataaatgtttgccaagtatgttataaacaactgtgcagtctgatagaggtataaggtcctttctgtcagggaacttaaagtctttttgtttgtttgttttggagatagggtctcgctgtattgcccagactggagtgcagtggcacgaacattgcaaccttcatctctcagacttaagccatcctcccacttcagcctcctgagtgacttggactacaggcacataccaccatgcccagctaatttttaagtcttttttggagatggggcttccctgtgttgcccaggctggtctcaaactcttggtttcaagtgatcctcatgccttggcctcccaaagtgctgagattataggcatgagtcactgtacctggctggaatttaaggtcttaaagtggaaataactttgaaagtatagacttgtatcagattatgaggagccagactaagaagttaagacttaatgatttatacctctcagcccagagaggatgccagtgagtttctgaatttacagcctaaggcaaattctttttgatttctgtgttccttgactttatttattactgtaggataatgccttagtgtatttgaataagtttaaaaaatttatgcctaaaggtaggtttatgagctttgcattgtataaaagagtacggtatgtaagaatgaggactccaagagccaaacagccagcttttgaatcccagacctactatttatttatttgaattttttggaaggttagtgcgcagccgacctagtatttatgagctatgtgaccttgggaagttcatgtaaatgcagtgtctcttgccttacatggaaaatgtccatgaaaatcatacccacgtgaaagttattacaaggattaagtgaggctgggtgcggtagctcacacctataatcccagcactgtgggaggccaaggcaggcagatcactcaaggccgttcattcaagaccagcctggccaacgtggcgaaacacaatacatgtatctgcaaagctcaataaggcaaagcatagtaaaacagcttgcctgtgtctcatacacggtgctacaaaacctttaaactggaaatgccaagaggcacagaccaaaaaaaaaaaaaaaaaagctttaagaaaaacctttttccccaagcctttggcttggggaaagggtgggctacaacagaaaggctttttgacagtatcctccctattgctgccaaacacccagggaaaaaccacaccccatatcaccaacccctgccagtgcagctgggctgtgcagagttgatcttccacactggtccttggaagcaggcggtgcttcagttcctctgccaggtggtgtcaggagaacggagaagggtgctgatctttcattccccttgctgggcagaactagttagtactccatggcagagccaggagtatcagcggggtccagccttatgctgagcttccgtctctaccgtgtagcaaaaaaataatgtgagtcagctctcctccctggtggcagtggggctaaggggaatcccgtcgaacaccctaacttggaggaaataaaccagtgccagtcagtgcctcatattcagtggaaagttgtctgcagggccaagttgggaggcgaacttctacctcattgtctgcagcaggcaatgtgacccagtgccctgctttttccactctagtgatgatagcgccctggaggaagcagagtccacacccaccaccccatgctacatgtcaacaggggtactgcctgctaagcaaagatgtccagggctgggagcagtggctcaagcctataatcccagcactttgggaggccaggcaggaggattgcttgaggccagaagtttgagaccagcctgggcaacgtagacctccgtctcttaaaaaaaatttagctggcggtggtatgtgcctgtagtcccagctactcaggaggctgaggtaggaggatcgcttgaacccaggaaattggggctgctatgaaccatgattgtgccactgtactccagcctgggcaacagagtgagactgtctcaaaaataaaataagtaaatatcttttgatgtccgggatacagtcaaaaatctcaagaaccaggaagatcaccgcatgaatgcgaatagccagtaatggatacaagcactgagatgaatcggatgttggaattctgacaagaattttaaagcagacatcatgaaaatgcttcaataagcaagtatttatttattttaaacaacaaaaataggaaatctcagcaagaatttatgggcctaccatgagggaaatttttgaggtgatagaaatatatatcttggcattgtggcttatgcatttgtcagactcaacaaatagtgtacttagagcaggtacttttaattttctgagtaaagtatacttcagtaaagttgatttacaaatcagggattttcatccctgaagattctggttcagtaggtctaggatagagtccaataattttttttttaattaatgccccaggtggttcttgggaactcctgatatctccagaggaacctaggctagttgagaattcttcagaatattaatctgttagcaatctgtgtaaatagaaactaggtctggtaaattatgaattaaccagataactacttgcagaataaacagaatacataattagaaatcattaagtgtgttatcaccacatggaaataattttttgtattttttttattgggtagtgttgtgaagaatattacatggtatccttagaagctgtaaattgtgatgctgggttataaaaaaactgtattgtggtatgtttttgcctctctcacttaaccccacccttcactccattccttctcaggacacttatcttcttggtggctaatggcagggtggattccacatttgggaactgctgttgcctgggcagtcatggttttcatcagtgtgtcccagggcgtggtgctttctgtcaacatcctgctctccatagaggctgagaatgatccctgatgcagtcatcacggcttttaggcctctcccattggcctcactttaacctgatgactatcatatttccatctaggctgcatttttaaatcttgtcaaggaagcccagggactctcctcactgataagccatttccaatccaggcctggggttgagtcaggtcaccttatgttcttactctttcccttgacttagattggtctggctggtccacccagataaagtgtagcagtgtctgaagctggatgtgaggggtcgggaagttgttgatggggatgccttcattccgcagcacacatttcaaggcaagcagatcattttcctatagcagtactggtcagagctggattcaggggaaggctgtctgtgtttcccacgtgggccgggtgagctgctagcatttctgtcagtgctagaaggaaagtcattctttcaatgtggtcccagattcaaaatcagttttgagtgggtgtcagaatgtcattcctgatagcttctctgttttgacagtgcaaataccccggtctcatttctctgcttttaaataatagatccttgagattggccctgggtaggagacctcccccaccccacttctttctctgagttcaccatgggattctcctaatctagccagagctggatttgatccttgggtcactcctgtggtctctagccctcctcagtgcttacttagttggtctttgtttctattggttgtttttgcatgtgtcgtggttatcgtcatcatatgactaatgtcagggggtcaggcacagttatagcttctaattgtgttgcgcttttggcaagggaactatgtgtgggggaaaaatacttattaggaatcgtcagcctgcattaaagggtcgtaatacttgaacaatttgcacatgatatctatctctacatcctatatggactgtgctttctaggagggattagttaggtttttcctttcctagtatagaaccaggactagtaggggaaggcatagaggaaaatactatggttctgtttcagagagagcattcttgcaggggtttcccaaatgtaaatttttttgttttttagagatagtgtctcagtctgatactcaggttagagtacagtggtttgattacagctcactgcaaccttgaactcctgggctccggtgagcccctcgcctcagcttcccaagttagtgagactacaggtgcacgccaccacacccagctaattaaataaaaatattttgtagaaatggggtcttgctatgtttcccaggctggtcttgaactcctggcctcaagtagtccttctgcctcagcctcccaaagtgctgggattacaggcatgacccaccatgcctagtcaaaaatgtaaatattaggtcttatgttactgaaggtattccaggaatgtttggatgtggtacagaagatgtgggtattgggaaacctctaagaatatttccaaattttatcttctgttgttctttaaaaaaaatataagctgtgaatacaaccgtggaaccacaagtaatataagaggagctgatttcttggtgcctgcactgctgactaaagatccagtctggttgcttattcagtaaacctttgagttagtgcagggagtcactctctgttttctcagggagcccttatttgagtaactgtcattacctctttccctaacccactacctttaattgtccttctgtggttagaaaaacttagtgtttgaaaggcatagtatctcaagggaactttagaagtatatcttacctttgctcttgggcatttccagatgaccctggcagtgtggccacaagcaaactggagaaggctgccagtatgtgcacgttttaataaatggaggatatctagcacctcctaacccttaccttctcctccatctcatcccattttctgattgaacagtcacgttatttctagtcttaaatacttagcttttctagttgtgttaatggaattgttgtatgtatttcagttgtattacttaagtgtcttctaaaagacatttgtatactttataattcagagaaaattctttggttgattgaagatcttgctaccaggtcctggtggaagcagctagaatttcttaagcagttcctgtgaatgtttcctttttatgtagatcatttcttggaaagctgtgttttaaaataaagctctacaggcactactgttttactctaaggcctttgagctctgatatctaagacatatttatttcttcaactatgcccaggacagtgctttgcattcaataggtgaccagtaagtgttgagttttgttgaatataaaattatttacaaatgattttttgttttttccctttaaaaattaggcttccgagaaaactttgggcttcagagtccctgcttccaagcccctctttgtaacactctatgaaatgaaaagcatctttggatggtatggggagagctgaacaatgtgaggtgggagggcgttggcctttaatcaggtttctggggacagatcactcatgctggttcatgctggcccaaggctgtcttctttcttgtttgtggatgtgggttatgttcctatactgagatgtgctggatgaaaagctaataaatattaatgaagcagttacttctgtcaggcacagtattggctagagagataggtagaaataaatagaaaatacagttcttgactttgagaaccttattgtgtaattggaaaggtaaaatgtaaatgccttaaaagttaattaacagtaattcttaaggatccttagattgtctaatacagtggttctcaaacattagtgtccctcagaatctcatggagagttattaaaatacaaatcacagggccttatccccatatatatatatatatatatttttttttttttttactcatttggtctgtgtcatgagaatttgcatttctcagttaccagatattgctggtccatagaccacacttggagaactactggtgtggtgcagttattctcaaccttggctgtatgttagaatcacccagggagtttaaaaaaaaacccatgccaagaccccacccactgtagaccacttaaatcagaatctcagtggggtaggacctaagcatttttttaaagctccccagatagttgtaatgtgcagtaaggtttgggacttactgctctaacgtgtcagggccacagaactttggattcagagatatgatgttaccatgggctgcagcagtgtggacagaccagaggagttagcctgatcttaaagaatgataaataaagaaaaaggaatgatttttgttcttgtaaagttaatgctgggaacaagccagttggttttctagctgtttcttgggacagactgatgagtttgtgagctcttaggagtcagcatgatttcccattcagcgtgagctaatgagtgggactgaggtgtgggtcaccaccatcaataataagcattcactgaccacattctctttttcctgatatagatgagcttgtgtttatcctaacaagcttagatgtgtgtgtgtttggggtggggtgtggttgtggactgtgcaatagtgagaggctgaactttgaaaaatgactttgccatttttacatttcatctctttaagcctctgtttattcatgtataaaagaaagtactacacatagttgtgagcctttttttttttaaaaaaaaaaaaaaaaaaaaaaaaagagtctgggtcttgctatgttgccaaggctggtcttgaacttcttgggctcaagtgatccgtctctgcctcccaaagtgctgggattacaggtgtgagccaccgtgcctgtttgttagtatgtgtgtgaatactactacaattttaggaacactgttttatttatttagggacccccagaatctatcagtgagcctgacacatagtgtctgtgcagtgaatccagattggttgaatgaattggaaaggttatcttttcacattgactgcccaggcattagaaaggatgggaagagcttgtttcctgatctttacaaaaaatgctgccaccttgggttttccaacttaggcaagaaatctgttatgttcaaaataaaggagtataacttaaaaaatatatagatagaagccaggcgcagtggctcacacctgtaatcccagcactttggaaggccgaggaaggcagatcatgaggtcaggagttcgagaccagcctgaccaatgtggtgaaaccttgtctcaactaaaaatacaaaaatatagctgggcttggtggcacatgcctataatcccagctactcaggaggctgaggcaggagaatcacttgaactcgggaggcggaggttgcagtgagcccgagattgctccactgcactccagcctgggtgacagaacgagactccatctcaaaaaaaaaaaaaaaaattaaaaaaaaatatatatatggaaatacattttctcagtgtgtatactagtcatagctacctgtgacttattctttattttgtgtatttttttcagacagggtgttgctctgtcacccaggctggagtacagtggtgcaattagagctcactgcagcctggacctcctgggctcaagcagtcctttcacttcagcctctgcagcagctgagactacaggtgtatgccaccatgcccaactaaaattttccatcttttctagagatgggggtctttctatgttgaccagtgttcttgaactcctggcctcaagtgatcctcccactttggcctccccaaatactgggattacagatgtgagccaccacagctggccttacctgtgatctaaagaggtattttcaattgatgtttggccatatcagattttagttgctattaaattttattcttaatttatcaagtttaattgattattaaaaaattgcactctaagaataagcctgtgttttatttcttggaactactagagccttcgttacaatacattttagagggctccaaagttataaaataaatactggagatttggtgcttgttaaaattttgaccttttctattaaagcccattggagtgatgtacagagaaaaggctgtcttgtgttgtgatagggccatgctccatccacaggtcctgggaaggatgatgtaactgtggtctaacagcattgtctgaatttttggcctagggcaaagaggaggagggcgggtaaagaaacctgatcagaccatttgatgctaatttcacaggtgactggtcactgtgtgcctggctgttgttatttatagagctgtaagtggctggagctacacacaggaacctgaaaggatggtctgtattagagtgtggtggtagatagaagcacagcagtagaatctagggacaaatggtcactggtgagtgtcattgctggagttaaatgagactcattagtggctgttatgatttccactcttacttcattgctattcctgagtctttttgaaagcaaacaacaaaatagaccgaaacaacctctgatagactctccgttatttttaattgaggttgataggattttaatcaggtcaacttgcatactgatttcaaccaccatttaaagagctatccacaaagctataaattagaattatagttcaaaaggtctgactgttttaacctactgctcctattccccaaattattgatggggaaactgagatctagcagggttaaaaaaccagcccagtttcacagttagcagtgatgctggagctgtgatctggatcttaaatctctcagtttagccttttctgttttctaccgtattagtcctacaatgaaaatgcacttctctgtctttaaatttcagacgttgtctccatggcctagatgaaggttatcctttgttatgatattttctcagaattactttgaaaaatggttccattgttatttcttaaaatgaaagtaatatgaaaacaaattccttctattgataatacatttgcccactactgatagttttaggaataatgagaaaagagggggccaatttatggtattggccaagaaggagcgctcagcagcactggactgctatgtgtgggctggaggtaccagcagataacactcggaggcagtgggtcctgtgaatcacagcttggcctcggcataagctctggagaccagctctcctaaggagaactgccttctttggccctgccctcagcagcctgttggcagaggactagaataattgtttgtttaaaagttttactagctaattatactgcaccgaattgacaggcatctctattagagtctttccagtctcttgaaggctcttctccacattacttgtaatcttgcctcagtgtagactgcagtggctgatttttgtttgtttgttcttctctcctttcccttcccacttgttgcaaaggccacacaccaagtctggagagagagctgcctgtgggctgggaattggctgccttcatctggtcagccatatgtggctactggaaaaagtgcctttgggtcattcattctcaggtcaccaggccctagagtaaagccctaaacatgggctctctagcagaaagacttattaattccccttctcttaagtggaggcaaggaggtgtttctgaaccttcagaataacccgagggaacttgaaagtacagattcccggatgctatctcctggatgtgggttcaggttcagtaggtctgaaatgggaccaggttttagaatcttcttcgcggcccggctcacacctgtaattgcagcagtttgggaggctgaggtgggcagatagcttgagttcaggagtttgataccagcctgggcagcatagtgagaccttgtctctactaaaaagagagatcagctgggcgtggtggtgtgtgcctgttgtcccagctacttgggaggctgaggtggcaggatcacttgagcctgggagatcgaggctggagtgagctgtgatggtattactgcaggtggggtgacagagtgagaccccatctctctctcttgttttttttttttttgtttctttttaaaagaaccttcattacattaattgacttccaaggtctcatccagtcatgatggtttttgcatggtccctaccagtagaagatggatttcagaccacagggaatttatttgtagctacagtcaattttcaaattatttgccttacaaatgttttcaatcccagagacctttttcccagctggttcctgggttatattgccaaagtccctggttggtatgcactcgagaactgaaagataattttcttcttgattttaagaaaagataattaaggagggaaatctaccattaaaaaaaaaatcagacattacaaccaagtataacttttagagcagatcctctattgggaaggagcaatatgttatgttaccttgtatttgagcagttaattagggtcagatgtagttagttctcatgctttggccttgcaaaagtaatcccctttttggaaaggctttgttgagtccctaggaattattttaatggtctctaagtatgtttaactcagtcataatattctagttgtttggatttgttgtgtattgacattgacttagatattctcccctgctctgggctttacctcttactcgtacccaaatccatggtccacatgctgtggtgtcccctgggcatgcccagccttgccatgtgtgcaaggtaatccctttgaccctctcaagagggtgctgctcatcttttttttttttttttttttttttggcttcacttatcccacttgacattgccaaacgtgctttgacttgaagcaccgctgctcctgtggctgtctcctttgcttctcctcttcggctcattgagaatctgtttgagatacttgtcatcctttggagattagaactcactttagagggaggaatgattttacactgggactgttaggatcagtttaggaggaaacaggcccacgatgattttaggaggggtttctactgtggtccttgtaaccacatagtttgtactgagctggacactggccatttgagtagatgcttgttctccagttatagaatggttcccagctggcagatttcccactgggattcagtttccttggccgctgctgtttgttgtgctcacactgatttttgcggcatctttccaggcccttgagtcttttccaagcagaagaaatagcagaatgccttgccctccccttctcttctccttttgggtattccatggctattagggaaggacttcctgtgaaataaaatgagggcaaaggaaagtagcatgcctgtggcataaaaatgctgttagcaagcttgaggcatatcagagagattggtcctaagagtaacatttactgcctttctgcttttgaacttttctttcccccttcctttgcctgtttctgaggtctgggatttatccagaatttaagaacggactgtttttgatcatttgaataggtatcatcattcagcagggaatacatgtgcagactgagatgtctcttaaagccaatttatagtataagtcatttgaaatgatttcttgagtcagtaatgcatttctgcttcaaattctctgcctggatttgtgcattcatctcccattttaccaggtgatttgctttattatgctgctatgacagcccccctccccaaccttcaactgctatccccagatacgtgggcatgcttttcagggtgagtagccattaaactacccaaaatgacaccgaacgttgtctacacaggcttggaaacatggagggcctggattccagtaaaattctccaggctgcttcgtcaggctattgcagaaaagattacagggtcctttaagattagttttggagagatctaggcagatggatgggtgaagtcccaatgggaagtcagtacccagttgccacttggaataatctaaaatcctggcatgatctttcctctcataacttgaagtactcagctagaggagagcctctccttcgcaagacccagctatctctttgagaagaaaagggggtttggatggagtccaaccttctggtttgttttgcccgtctgccatttgccttttccttgttggtgtttgctgctgtttgttctttggagtctgaggggcttctgaccttggctgaagggcttctaaccctggacaggtcccgaaggagtggcatcagatagttgtgttttaatttcacaaatctgttatttctttaagaggaaatgagcaactggtagacccagaacagtaccaaggggagctggggagttgttatttgtaagtgtagagaaagaaaggaacagttacagggaggtttggtgcatgatacacagctgatgccttcagagaataggaggttttctttctgtgctttttctcataacattggaggaagaagaaagaggaggcatgtggcttgttggtggttgaactccagtgcagaagttaacattccactcatttagctcactaatttattaattaatttcacaaatacctattgtgctactatgtgccaggcacccttctaggtactgggtttacagtggtaaacaaaaaaaggtccttgctgtcgtgaaccttatactctagccaagggggtggtggtgatgaggacatatttataatggtggtggtgatagtgataaatactatgaaaggaaaaaaaaacaagaaagggaagagaatgggatagggagctattttagtaagtgtgttcatggaaggccttataaatgactatacaatacataaataatcattaaaatgagattttattacctaaaatattttgaacacttcagttgttcaaattattatggaatgctagcatgcatagggactgaaaatatttttttctctgaagttttgagggttttccaaggatttagcttctctttgtttctctggatattcagactcacatagctagattagagttcaccatcacagttgctttcagcattgattgagacagtcttatgttgtaagggtctgctttttacaaaattgctataaaattgttctgtgtgattgagaggctccctctcactcaaagtagatgtttggctgtttttgttgttctgttttaaacagtaatgagtaccttttggtaattaaagtccccttcacaaaactgtagtgagtgatgaataagacataaacaaagaatcccttctgcggagcagagtgccaatggccatagacataactcaggggctgtttgaccacataactcagtgcagtggcttttcaccattggaagggtggaatggtctggtatggttttctggattgctctgataaacaggagttatatttgctgtcagtttctatgaaaggacagcattatatgagccatggtttgtcaggggcctactgtgtgctgggctctttgctataggatcaaatgctaactacatctattccacaagacaccctatcacagtgattggtttttttgttgttgtttgtttttgagatgaaattttactcttgttgcccaggctggagtgcaatggcgcaatctcggcttactgcaacccttgtctcccaggttcaaacgattctcctgcttcagcctcccaagtagctgggattacaggtgcccgccaccacgcccagctaattttttttatttttagtagaaacggggtttcatcatgttggccaggctggtctcaaactcctgacctcagggtgagaggtgaagccagctggacttcctgggttgagtggggacttgcaaaacttttctgtctagctagaggattgcaaatgcaccaatcagtgctctgtgtctggctaaaggattgtaaatgcaccaatcagcactctgtagaaatgcagcaatcagcactctgtgtctagctaaaggattgtaaatgcaccaatcagcactctgttaaaatgcaccaatcagcgctctgcgtctagctaaaggattgtaaatgcaccagtcagcactctgtaaaaacgcaccagtcagcgctctgtgtctagctaaaggattgtaaacgcaccagtcagcactctgtaaaatggaccaatagcactgtgtaaaatggaccaatcagtaggacattggtggggaaaaataagggaataaaagctggccaccccagccagcagtggcaacccgcttgggtcctcttccatgctgtggaagctttgttctttcactctaaatcttgctgctactcactctttgggtccgtgccacctttaagagctgtaacactcaccacgaaggtctgtggcttcattcttgaagtcagcgagatcaagaacccaccagaaggaactaactctgaacacaaggtgatccacccgcctcggcctcccaaagtgctgggattacaggcctgagccaccgtgcctgacctgtcacaatgattttttaaactgcatatcttaatccattagtgggtgacagtcagaattttattttattcagtttaaaaaatagaatcaaatagatgacatcagagtatactacacttagtgtgtgtattgtttcaaaaaaacttgttttaagtgtatgtgcatgcaggcagacatcagaaatttttatgtgtcatgctctaaaaagtttgaaaacaagcctatcagttgaggtttggtatcatttataggcaagtaaactgaaactctgaggttaaggacgttgcctactatcagaactaaaatttgaactcagctctttctggctttcagcatttgatccaattatgtttctcacagagctttccctctctaatggttttccaagactcttgagatcacagagacactgatttgctcctgacgttgttctaaaatcagaggaggaacatgcactctgatgaccagacccaagtttgactggtttctcaaaacatctttacataacatagtctatttcaggagaagggaaaagaaagatgactctagaacttgtctttattaagaaacaaggaaaatctagacactctttttctgtcatagaaagatagcctagttttaccagagaggagaaattctaaccagaagtagtatcaggatctttctctctaaagcacttaaagtcttttgttggcgagacgagtagagcaagaggaatctgccaccttgtgtaaaacattttggttttactagtcaggcatatttttgaataaccttcactagcatttattatagtagttattttattttattttgacacagagtctcactctgttgcctaggctggagtgcagtggcatgatctctgctcactgcaacctccacctcctgggttcaagtgattctcctgcctcagctgtaatcccaagaagctgggattacaggcgtgccaccatacccagctaatttttgaagcctctattttagtttcccccaactttactagagatggggtttcaccatgttggccagggctggtctcgaactcctgacttcaggtgatccgcccaccttggcctcccaaagtgctgggcttacaggcgttgagccactgcgcctagctgttacaacattttggcaccagttttacctacttccccagcctcctaggaatgaagtggaacttttattaaggacagatttttcagaggggcattattctcactggcattccttccctcttgcctggaatcacccttgaatgaattcctgattggttcagctagactttttcttttacagaagaaattgctcttggtgaagatgccagaaaaatatcgtaaaaacctgctctcttatcctcttctctgtactactttgttaccccaccccaccccacctcaagcccccagtaaaaaatgaccttttggcccagggccctatctgagtatattgtgtggcagagttgtctctggctgactcccaggattgttaatgacttccttctctgtccctaaataattgcttgaaaagacagctgtggagagacattgcccccagcttgcaggctcattaattcagccctatgaaagagggtgcaaaggaagaaggtggaagttactttgccaagagtagcaggcttgggggaaactaaaatagaggcttcaggggaagggcagcagcatggtgtcagagattacacttggagtttgtgaagtctgggcaggcttcaatctaaagaaactttatgcacaaaagcccaaatccagggaaataaatgaaagtgattattcacttttctaaagtccttacagtagcgttcctctggtattgtttgaatacagtttaacctgaagggcacttggtttttgtgcagctcttcaagaacagaagcatctaagtaagtagaaagtctgagaaattaacagagaagattccctaaaagtcagccttcattacttgaccattattcataattctgcatttgtctattcctccagtggccttgaagcaaaattaaaaaaaaaaaaagacacttctatgccccttaaaaaaagaataatcaaaacttgcatagacagaataagaatcaaatacactggggaacaaatactctgattagctgtccggttcagctctgacgcgtctagcactctgagttataagggaaacgataggacacttggtttttgttttccaacaacaggaaacatatcaggtttctaagaagatgtaaagtctttcttaaaacccaattatagaaggaatttatgcaagtctttaggcaaggagtattaaagaaattaatgtttaatgccatcaacaagttttcaagcagatgcagaactcctagtgtgggtgactttttggtgtttaccttatatcaagaatgcagcatttaaggccactttgacagagtgcagctaagctttttgggtttgcttgtgtggacaatttccattcagcaatggctctcaaacttcaatgcacatcagaattacgtgggggcacttaaaaaaaatgtatgcccaggctgcatccagaccaattcagtcagaatctctgatggtgagccccaagtatcaatattttgtaaaactgattccaaaggttagctaagtgtgaatcagtgcgttagatgatctttaacgttaattatcttagctggatttctcaaaggggtagtcctagaatgctgatattccctgttattaatttaagtaagtccctgttgtttctgttaacattctcttagaactctgagacttgtatttctgctgggacccagggctactgcacctttcttggcctataggagtgttgtcagaaccaaagtacttgttaagcagcagcttaggatcaacattagcagacctcattgtggctgttggagaatatagaacatcagatgaagtaggggcttgacgtttccacagccctaaatcacatatttcagagtacgttaagattccttttggaactcagatctttttctggccatggatagactgttgtcttggggggatgccagttgtctctccagtgagaaaaggagatgtttatgtattctctagttcccttctggaagttaaaaatacctgtcattgttagatttggtttctgaactctctgcccctaacaaagctgaaatgatgacagtgagtgaagtatttgcttaaataaatatcttttttttcaactttgaagaactaaatatatctcaacgtgttgaaacatcagagaattggctgggcccagtggatcacacctgtaatcccagcactttgggagtctgagctgggaagattgcttgagctcaggagtttaagactagcctgggcaaaatagtgagacctcgtctctactaaaaataaaaaataaaaaaaaaaatggctgaatgtggtggcacgtgcctgtagtttcagctatttgggaggctgaggtgggaggatcacttgagccctggaggtcaatgctgcagtcagctttgattgtaccactgcactccagcctaggtgacagagtcagactctgtctcaaaaaagaaacatcagagaatcattgattttatgtaatctagattttatcccattccaaattgtgcttctgtgaatacacattatggaggataacggaaagggtgtttagggaaggggatgacaatgggaggagagggagaaaagggtggtgggagaggtaatataaatgataattaccatgacttgaatcttggtaaaatcgtataataggaaccatgtggtactggtgttctgattaaaaaccacttcctggctttgtgaccttgagtaagctataactctatttttcagttttctcacctgaaaaattataatgatacctgcctgttaggattgttttgaagattgagattgttcgtaaaatacttagaaaagtgccttggcacatagcaagtactatttaagtgtttatcagagcatagtctcaacttgtcccattaagaatattataaaactgtaaggtccagatgatgctttattctgtaaaggccattaatggagatgcttgaacatctctaaattacctttccctttgcttgctcaggaagtttgctaatctaaattcttcatgctgtgctgctgagtgtcatgtgtgattgcttgtgcaaggagacccaactgggttctatccgcacttaactgaaactcaagttattccctctctagccttaattcctgtcttctaactctccaatcgatttcttggctccactaattgaaacctaccccagttttctcatgctgttgagcagggatcttcttgagactgattatgatgggagaatgacctcatagtttctgatgccatcttccaatttatgtaactcagccccaagcatgctttttaaaaataatggccctaaattgctgacatcttgtcatctgctcagactcctaaatctttttgtgttccctcgactgaatgggattcactggagcaagatgcctttgtgcagtctgcatttagtgcacttggcgagtgacctccaatagagctgtgtgttcccttcgagcaacatgggtaatgattacagcgacaatgctgctattgtgtccagaggtttggggctgtaatttcataatgaaattgaaaaacatgagattaaaaacctgaatatagcacagtaattatatttaagtatcacaaatcatctccctgtatttagttaggtgtttgagatttggcctctttgtggagtgcagtcacgtcgtttcatacatctgcaaaatggaaggcttctaatttatggctaaaatgtgggaattgctttctcttaatgggaaggtgaggagaatggtattgaatttgaaggagctggtttgcttcattgactagagtcaagaagggaggttgtacaatagctgcttaaggtaaagaaatgtttgggtcttttcatggtttaattcccagatacttacacatgactatagtctctccctttagaaattaactgacataggctggcctgggaaattctacagtcctgcagcaaatggtgcagttgcagaagtgtgaatctttacctaaggcagggtttctggtatagataaagacttaactggggtttgtttcccacaggtaagttatggatgagctgtgcctggcccatttccatttactgtctgagaatctgcatgtggcctgcaggctctgtagttgggctgagtcctcctggagtaggaggctggggaaggtgttggtggtggctgtcgataggcattcctgcaggatggtgggtggagagttagggtgaggggtgttctttaataaaggaatagaaattagagtggaaagtggtttaaagctagtgatacctccttctccttgatttctaggaactatcaagtatgaaatgaacatagaaggaagttatgaaaggaatcattattattgtcagtgattcttgattatctactataggcaaacacgttaagttgttgttttttttttgttttgtttttttttaagacggagtctcgctctgtcgcccaggctggagcgcagtggcgcaatctctgctcactgcaagctccgcctcccgggttcatgccattctcctgcctcagcctcccgagtagctgggactacaggcgcccaccatcacgcccaactaattttttgtatttttagtagagacggggtttcaccatgttagccaggatggtctcgatctcctgacctcgtgatccacccgcctcagcttcccaaagtgctgggattacaggtgtgagccaccatgcctggccaacactttcagttttggttaccatctttaaacttcacagtagacattgatacagaggtatactttctctgtgcacatatactgcctctcaccccaaataatttttgatacagcagtgcagagtgtccctttttttccaaagctttcctcccagattcttagtgaatctacgagactgagtatctgaattgcctaaggccttttatcacaaaggccttaggcaaatgtatgcaagtgtacatacattaccaggcttcatcaacatgccctactcagagacatttcggttcattaggtaggggtgggagaggttgtggcctaggaatctgcatttcaacaagcaccaggaatttttatatacaataaattctgagaatcattgccttaggaccttctttctcaggggccgggctattccagtgggtgtgttatgttgagatttgctttgtggagatgtgaacttgctgttcagtcccttttcctagcccctggcttcagtatatctttcacaaaaatacctacttttattctgtttccactggatacaaggagggctgggctttttgctgctttacccactattacagatagcaggttgggagacagtttgagtcctgtgtttgcactccaggcctactagggaagaggtggcctgcctccagcagtaaactggtaactatctaagacctatggtgctctctgtttccactggaaactcattgaaaatgctaccactattcatgtttttgacctctcagagcaaagtatataaaagcagcagttcaagtaaattcgtcaaacatttattgagtggtggctgaggctaaagtattattttaaggggcctgggacagataagtaaaacacagtttccattctccatctatcctgtctttctttctaatgatgtagacagtcctgacacagaactatggcagacttagtgtaacctgtgacatgatcgtgtctttgaacaagtgaaattaaagtgctataggaatgtctgggtgggaacagttagtttaggttaggcaaaaggcttcttaggggaagtggctttgggcagggtgtagggcagaggctctcaccttggctgtgctttacaatcacctgagagaattttgaaaaaccccaatatttagaccaaaccctataacaatcagatcagaacttctggaatttggacagagacagcattttttaaatgtttaaacatttaaaaacattaaattttttaaatgtttaaacatttttaaagcttcctacatgattttaatgtgcagccaagactgagagccactgacaaagaaggataaataggctgtcattcagatgggggatagtcagagaaggaaaggtattccaagcttgagagaataacataagcaaagctgcagaggcagcagagtgatggcttaagttggagaatgccactcaaagcgggggtgattggagcatggggctcctggcatgagcgtggagggaaaattatgctgattaggtaggattggattaaaatactgcatcaaggaattgggagacatgattttgcactgcctttggaaccccttttcacctcatattaggatggagaattgaggttcggagaacttcttgcttgcccaaagtactagtaagccagcaggcatgcttggttccctttgcaaggctctttgccatagacctgctgtctcaagctgtgcagtacttaagacttctcttttggcatctgtcctatagcacttttctttcatcagagcaccctaaaggtaatttagggtcagaatggtaggaaggtattggtgttaggcaagaatatggcacgatttcttatctttttgctgggcccctgtgggaatgatatgggagaattgctgggaatactgggggcagatgtttgcaagtaaaagtgtatatgtttctgtgttcttgcagctgcattcgttttgtgcctgattccactaaggactgtactttatctgcttattgctgtttctaggaagttaatttgcaggtgctataagtatgcatgcttcatatacttcatttattctttcttccttgaagcctctcctctttattaggcactattcatttgtctacttggtacctgtatttttttaatgtcactattttgacagtaccaataaaggtaaagccactcaattacgcagggctctctctttatgctttgggtaggtgcacctgtgcaactgaggggacggtcagtgttatcaaggttacctgttattacaagtagaagaacccacagagatcaggagagagctcattttcctccattagtaggaggtaggactatacattcacaaacacgaaccttaaaatagctcacaaaatagtgtcatacatgtacccagccatctttccactcattccttctcaaaaggaatgtagtaccatatagtagttaagaatatagacactggagccgatcttcttgagttccaatagtggctcttctactttttaaatctcattttccttcatctttaaattgaagatagtaacaatctcatggggttgtgataactaagggggtaatgcatgtaaagtgcttagaaaatgcctggacataggaagctctaagtttgctgctactactgttattatggttactattattaatcattgcaaggaaaatgtatcaacagatgaatttggttcaatactgccttctagttttgtgaccttagaatttataggaacaaaaaagatttgaaagggaggttgggctggatcatagagagccttgattccatgttttaggatgtatacacagtgagaagtccttcaggttttggtcttggtaagagttgtgaatcagaaagttaactcttgtagccaggcggagtggctcatacctataatccaaacactttgggacatcgaggcaggaggatcacttgaggccaggagtttgagaccagcctgggcaatgtagtgagacccctgtttctgccaaaaaattactcttgcaacttcatgaaaaataaatgattagcagaattagagcagttaggaggccatcttaatagtccaaggcacaataaggcaaggaaatgaatgagagcagtggcagcagacatgaagatgagcagttggatgcgaaaggtttgttctatagatagattcctcttggcttaagaaggggaaataggaaattaattagtaatcagaaatatttgcatattagtcttctccatcttcatccttgatgagaggagagcttgttatgtatgtaccattgctgggtacaggaggcagaagagctagcgccagaacaaggagctcagctttttctggtctctgcttttacgtggctcgttataaaccaggacccaattagttctttaggcatgcctgcctgttctctttccatgtaattactttgtggagcttgggttcatgcacatagttacctcgattaaaaaataagtttttggagctataaattttcaaacactgctttgagagggtctgtcaggcattaacattcaaggtttctgtggtgggctgacgatagcctctagcctctggatgtttttcacattccaggaaatgacacctgaagttttcagttccttttcgcatcttcagcaatccatagacagtggggtgaaaagatgtaacctaattgaagacggatggagtggagtagaagttgaaaatagggaagaggctgggtgtggtaactcactcctgtaatcccaacactttgggaggccgaagtgggagaatcacttgaggccagaagtttgagaccagcctgagcaatacagtgagacttcgttctctaccaaacaaacaaacaaaagctagttgtgcatggtggtacccacctgtagtcccagctacttggaaggctgaggtgggaggctcatttgagctcaggagttcgaggctgcagtgagccatgattgtgccacttcactccagcctaggcgacagagtgagactctgtttccaaaaaaaaaaaaaaagaaaagaaaatagggaagagactgcatgagtcctgccatgcagtctttcccagaattggacatttttgtggtgtggtctggaagaaggaaaacatttatggtcatacctctccaaattgaacaattgtgggaatatgtacagacagatttgcagggtagctgaaaagaaatgcagttctgttatttttttgttatagagtggtaacttgagtgaggattatgaaacattgcctagcagaactgtttttttaattgaccttcatgtataattaagaatatcaattattaatgttaaatatattggaattttaaaaattgtgattatttctttgtaatctgatttgtgctatttgccctgattatcagagtgttgtttgagattaaagtggtctagcttgggttcagtttgcaccaggagttttgaattaactaggctccatctgaatgtggaagattttcgtcgtgaggatgcaatggaatcgtaagtgtaaagggcctagtatagtgggtagtaatttattttactcctttttttccactttaaatgaagagtggctaaacttcaacttttgggacattggtctctacctgcacctccagaatgtaacctcttggggaagatatttggagacctggggacttttgcaggtgggtagtattacgcagagcccagatacccctgccttcttgtctggaaatcagtgattctcaaactgctttgtgcttgagtattacctggggggacatgttccgttttcagctccccaagccatagagttaagattcaatagacttgaggagctgctctcagtccaggattatgtgcagatcccgaatctgatcttgggctgctgtgcttttccagtgcccactcagtatttctggggctgcaaggaaggcagtggttccccttcacaggtacgtgaagctcttaactccatttttgtccttttaaattcacattaaagagagttttagatatgcaggaaaatgagaagggaaattgaccttgcctgtctctgggtcttgtgaatagaaaggaagagcctgcgcttggaggccactgggaatttgtggtgttccagaagacctctgctctcatgtgggctcttggcagcctcactgagagccacaatgggcttccttatttaagatgctcttaaattttcttttctaacactataaggttatgtcttcaccagtttctcagattttaaaaaaagaaacagggaggtaaaacaaatcccaaaacattttttttccttcttgtaaaggttacaaacataaatcatatttgagaacaatgaatggaccttattttttatcttcagaatgctgggcctctggcatcttagaaagtctctttactttcgaaaggaaggagacttgtatagtgagagcatcacactctggggatcaggtaacttggctatgctactgggcacctgggacttcttggtcagaacaagtctccactgtgagcttttttttttaatccatgaaatgtgggggtcctgaagctatcaaagcgttaatgttttatgattctagtgatgggcttctgtctgcgtgacaggcattttccagactttgttgatctatttcgagcttgtgaggaatagcatgtaccacccttcattacctcactcatggttcctcttcatcagtgctttataaactgtagtgtgtttgtgctgggaggaacgtaagagaacatgtggatcacccctttactcattttacacatgagaaagatgataccccaagtgattttctctaaggttgggacatgactggggctctccttgcgatttgcctttcccttcagtgcgttcggtaaacgttgcattaccccctcttcagggtattattctttcagttccatatgcctttcctttcccctgggatgctggagtattcagttttatttctaggcaaaagtactcctaactgtggcccctaatttttttttgttatgtatcttttctagaaagagaatttgattatgcattgtccatatgtttacatactgtactcataaatgaagttataaaatatatgtaagttaaaaatgtggagaaaagggaagtcttgtgcaccattagtggggatataaattattattggtattacggaaattagtacggaagttgcccgaacaattaaaaatagctgggtgtggtgactcactcctgtaatccttgcactttggaaggccaaggtgggaggactgcttgtggccagaagtttgagatcagcctggacaacatagtgggatcctatctctacaaaaaattaaaattttagctgggtgtgatggtgcacgcctgtagtcccagctacttgggaggctgaggtggttggactgcttgagctcaggagttcgaggctgcagtgagctttaatggcaccactgcattccagcctgggcaacagagcgaaacctagtctaaaaaaaaaaaagtgtgtatataagtacacacatacacacccctcaataaggctagagagaaaaaaattatatgtaagtatggtattttttttttcctcaatcacagtggatcagtttatgccttccctggatccagggtgaacttgttttgaggaccactgatccagaaagtggtggagttaagtctgtaccaccagctttagaatctcctgtggcacttattaaaaatacgaattttggtatctcaacccagattcactgaatgagaatgcctcctggtggaacctgggagtctacgttgtcttcatttttatgtttttaccaatagacatggggtctgttgcccaggctggttttgaactcctcagctcagagtcctcccacctctaccttctgagtatctgggaccacagtcacaatgcccagcaaagtctccattttaaaccagaggcaagtctccaggtgcctctgaggtccagcgagtttggggaaccggtattttagacaggcagggaagtgtcattcatgggttcatgagcatgggacttcttacactgacatctcagaaattgctcagctgttactgttaaatctacagtgatacagttagcactctggaaaatcagatgggcagttttcatttgagttacatatgagggactataacctgcataatcatacatggaatttcttaaaactccttggcattctctatgtggttttttgatttgtaaatccaaatatttgctattgtgcctcagtctttttttcctcattagaaatctaagctctccccgccccctcctggtgctgttccttgaggggctgtgtttttatttctgagcttttcccatttgtgtgtgttccttttgtctggagtatgcccaaccccctcacctttttacctgggcagttcctactatctaaaaaattccctataaatgacattatttttcattcttaaaatctaaagataatgaagaactagctgataatcagcatttaccaaaatagatttaagggttattatttgtaataactcatgtgtcagtaaccttatgtatgtaaggatagatcagtatcttggttattaagcatatactctctgaaacattcgaatcaaaccagtgtaagtcagataaatatgtaacaggaaatttgtttctgactattcactccaggtcaatgtattcccagctgccttgtgggtatcagggttatctgttccaggatcagctttaggaaagcccctactcaaatctccatgtagcaagagtgcaggctagttgagaacatgtgataattaaggttaaacaaaaaaatcaaggcagaatgactagaaattaggacagcagggaaagcaggggaagcggttgagctggtagaaatgggtaatacctatgattatttctgggatcaacagatacatccctgttgtagaagtccaaagcagtccttctttttggtgtcttttcctgcctttggtatgataagcccccctaacatctggcacactattggggtgacattgtgaagttacctctgcccacagtacttactccagtttgatatttttaagaaatgctcactttccactagccatagtttattggctttcagaaagtgtctggcagtgagtatgccaaaggtcaagaattctggcagagtttgatttatctctgctcccttgatagcagctagccttggaggcatagaagctcttgacaagtactatgagtcagaaggccacatgtgactaggtccctgcccacctctccagggtcaaatagatcttgcctttttccccagcccctccctgcactgttcctgaagagggctgtgtttttctttccaagccctcccatttatttacattccttctatctggagtacttcttaccccctcacctttttacctggctaattcttatatatcttttagataattctacataaataacacttctttcacctttcctaaactagaataggtattcctgctgtatgcttctatggtcccctcatttcccctagaataacttactacagtttttcgttcatacttactgttatccccctggactgtctgttctgctaggataaggattcttgctcaccatttcctcattgctaggcataaggtatgggacatagcaggttatcaataaacattttttgactgaataaaagcataataaaacaatatgttaattaatggggtgactggcagggatctagttgccaatttcagcattggtaattaacatggctagatttagctgctaggttctatgagaaagaatgattaaaaataaacagaaaggagatggaagttgatacgattaaaaacattttatgtgcctgctgatggacctaaaactgggcaaacctttctgcaaataaagctctaccttgatggtcttattgatataccatatatacatatatatgtatgtatataaataagatatacctatatataaaatatttatacctatatatggtatataaatgaatataaatataagatatataggtatatatatgtggtgtatatatacataaatatgtttgtgtatgtataataaaagacattactctccattgaagtgtttactacattatgtactatcttaaaacaaaacttcccacaggtgtcagtacaaacatgcatttgttcatttattcattcattcaacagttttgttgattgtttgatatatgtcaggcacttttctaggtgctcaagacacaacagtgaacaaaacagacaacaatctctctgactcaatggaacatgcattttagtggaagggaatgtcaataaagaaacgtctaatatctagagtattagaaactggtaagtgctaggaaggaggaaagggggccaggaaatgatgtgatgtgtgctgttgtggtggtggggcatgcaattttagattcagtggccaggaaaggagtcactgagaaggcaactcttgagtaattacctaaaagggggtgaggaagtaagccaggtgggtatttgggagaagtgaggtaggacagtgtgcatagctctttggaatgtgctcctcatccctcatgtttattacgttggccagaccagcaggttgggctttcagtggcctgtttgatcagaatctgcaaatgtttcctgtctttggatagtttccctgactaaatcttagcctgaagacgtatgttaaggggagagcgtatgtttcttcttgccaacttagttttatggaaaaggccctaaggaaaaagcctgtcttttccttttcatgggtcagaatttgtgttttgttattttctaagctctagtttgtggtggaaccacctctctcagatcttgtttttccttcagggcacagtgtatttctcacttaagtagtttatgcagtcttatcacagtgtcccctgcatggggacctgataacttactctgattgataacggaagggcttttctgtctacttctgtctccttgatggcttccttatctgttgtcctgtaacactaactgtgaactcatttcattaggtaatgaaatgttatcttctgtaattgcttatttgtgcagcagtcttgtctctgcaactggagaggaactttaggttctttctgaaccttagagtactggctcatagtgcctgtgctataaccatcattgattgctgttggtcaaagcacctgactttttggggtaagtaaaccaacatcttgcttttcagtgttttgtttttctggattacccatctatgctttgggtttaatgctccttaggacttggccttagtatgctgctggagagcccaagggaacagtatattagtaagggatgaattctttgtgaattcttaaatcttccattgcgaagatctttgtacagaatactggttctgtttatattgacagttcttcagagaattgtgtgttgactgttcatggcagaaacaccataagttaattgctgtttcaaatttcattgacactttccccctcatttggaggtcatttcctcaaaaatgtcgttgtccacatgacagtttgtgtatgcttaataaaagagaatgacaaacccaagttcagctgttgttactggactgggtggtttttagctcctcccacaatgggcaataatcagtttggggtctcagcagaattataaatacctgcatttcatagtcttcctgaaggaattgctttacttggaatactgtagttcagactgctgatgtaccgtgcactcctttctctttgatgatcagctctgaagtgcaccaattggagagaactcttgaataaatgctgtcacttgtcacatgtggtcactttctggggactgtgcatgtgccagtgggggccatctagaagccaccgatgcccactaatataacaaaactcactgggtttgcttctctataatgatgttggattgctttgctggaaatccttaccatcttggtttctctcctctgtttcctgtaaacaccaaataaaagtccttgcatacaaatgttaccatctttggaaaaaaaaaaagtccttgtagttgttaacagttacagaaaatataacctgaagacttggagtcaaaaaacaaatccctgccttcccatacagtcagtaccagctataagctaattaaactcaactgttcccacctgttcccggggaggcctctaacagtggcacatgcttttctctttgggacttaacatttttcagaactctttaaatttcattttctaggccaggcatggtggcttttgcctgtaatcccagcactttgggaggccaaggcaggaggattgcttgattctatgagtttcagaccagcctgggcaacatgacaagacactgtctctacaaaataaacaaacaaattagccaggcgtggttccaggcacctgtggttccagctactcaggaggctgaggtgggaggatcatttgagcctgtgtggttgcggctgcagtgatcattgtttgcaccacagcactctagcctgggtgacagagtgagactcttgtctcaaagaaaattttttttcattttccattgacaccatactaaacaacgtgtatttccagaatcaacctttatttccctaagaaaatgtagattgtgatgtccctggtgagcaataagttaatattggctgatagtatttgagcagcagtgacagataggaggaagacaggagggaagagatgggagtgttgctgggggagtgggtgtgaaaccataacacacatatatggtcacgtacacatctgtagtttactcaaatggcattttcacaaagcacagtagtgttgcaggtatcccccagtgggcacacagagctttcagtcctcactgtgtgaaacttctcatacctttgatgttgaatttaagttcattagtggctcctatagcatgtcagaggtttacctcacttggttcctgactcaactctgaaatgctgagtttagggtggatttgaagtgtcaccttcgtctctactttctaagagtcagtaaagagctgccatgatagttaatcctatagtgcctccaatgaagacttaaatatacttactagcccagactttgctttatcattctcctgatctattagttttattcctgttgacagccaaaatgtaggatcatgaaccccacagttacatggatggtgacagacctgagttgttgtcgagaatcgtgctgagttttgttatcacatttcttgtctcgatttgtagcatctctggattttacttctttaccagaatagtggttatcaaagtgtggtcttcgaagcagcaatatcatcatcatctgggaacttgtttgcaatgcagatttccaaggctctaccatgacttcctgaatcagaaacctttgaggaggaagccagcaatctgtgtcttaacaagccctcctgtgattatacccaactttaagaatcactacacagacagacgttgctttccttttagtctcttgagcttgtaacagttgatattttaacttttatatgagagaggacagttatatcttcctttaaactcttatttggtgcagttgattgtcagatgcagagtgctgatgtgaggatggactgtgaatatgatccactgtggcagtgtttatagtctcagcccaatgccttgttgacttaagtagcagccttgataacaggagataaatctgcaaagatactgtgaggttacatggcaaggcttttaaaatacaccaacattacatttgtggcaagtgctttgctcaatgttggcatttttgaagtcaccctttacctctgccccctgcccagaaatttccttgtgagaaatgtttttacgttagacaaactgccatgggggaggatagtcagaaagaggagacaaataatacgcagaggcagacttttttttacatttgttgctcagaagaaaaaaattccaatgaagaatgaaagaggcttcatatcctgaataaagtaaatgatctgggtaggatggtacaggaatagaatgtgactataaaaaagaaccaaattgtgcagacaagaaaatatgaaggaaaaaagaataggaaaaagacagggaaaatgcaaattcttatggaatatttttgcaaatctgtgtacagaaggaaccaagcaacgcagatcagttcttctgaggctgggagttctaaaaattatgcagtatcaaggaaggctttcttcctgagtcaagtgtaggaagcagaaccaacctttatttctctatgaagatgtatattgtgatgtccccagtgagcaataagttaatattggatgatagtatttaggcagcagtgacagaaagttttctttctcctgactgaatctcacaccaaggtccctttttatttttaattgtttagtttaatttttgttttttgttttttgagacagggtcttactctgttgcccaggctggagtgcagtggcgcgttcatagctcaactacatcctcaaactcctaggctcacacgattcccccacctcagcctcctgagtagctgggactataggcacgtgacaccacacctggctaattttgtaacttttgatagagacacacacggtcttggtcttgctatgttgcccaggctggtctcaagcggtcttcctacctccacctcccaaagtgggattacagatgggagccaccatgcccagccaaggctttttttttttttttttttttttttttttttaaaccagcgtcacaaccacagaagaaagacaagaggaagatatgaagacaaaactcaattttttttacttagtgtgtctaggtaaaggtttagtaggagataatgtagaaatgaaatatgataatagcttatttgtgttgagtgctttgatgtatgaggcattattctaagggcgttatacttgttgaactgtctacttcttacagagtctgatgagctacactctgtttgtgtatttgtttttggtggcttttttgagacagaggctcactccactgtccaggctggagtgcagcggtgccatcacggcttactgtagcctcgatttcccaggtttaggtaatttacccacatctcagcctcccaagtagctgggactgcaggtgtgcactaccacgcctggctaatttttttgatgagctagactctgttaccctcatttgctagttcatgaaattgaggcagagagagaaagtaagcaatctggccaaggccacacagctagcaaatgggatttaatccctagcattttcattccagagccttgcctttagccatcacactctactgtttctcttccatagtcgtcttctttcttgtgattccaagttaaagaattgtcatggatgagctttttccaggagtaaaggtacttgttggactcttcatcagatttggtcgcgggaaaagaggttgttgctcttccttagagacctgttctttctgcatttaaaatctgagtgtaaatttttttttagctggaaattttaaacgtgtagcaagtgtggccagcttgctcttgtaatgtttagtttcctggacctcatgttgcctccctaaaacttaaatggggttgtggttgcacaacagtatcatggaaatgaaatgaatcttaagcctaatgagtttgaataagatgagcacaatctaattttgtttccagtcgtttttcctcctttaaacaaagaatatcatgccaaattggaaacattggattgtgtcactgtgggtatttattttttactacatgtcaccaagatccagatttgttgagtgtattagttacatatggggtaaaattctgattttttaggtgtattagttatgtatggggtacaaaattaccacaaaacttaccatcttaaaacagcaaacttttactatcttagtttatgtgggtcaggaatttctgagtgacttatctgggtagttcttgcttgacttctcttttgagattccaggagtaaaggtacttgtcagactcttcatcagatttggtcccgggaaaagaggtcattgctcttccttagagacctgttcttgttgcatttaaattcttagtgtaaatttttttttagctggaaattttcaacctgtgtagcaagtgtggccagcttgctcttttaatgtttagtttcctggacctgcagccgaaatgttatctggggccactgtcatctgaatgtttgactggagctggagagtctgcttctaagatggctcattcatatggcttttggcaggaggccttggtttctcaccacatggacttcttaacatgacagctggttttaccagcgtgactgattcaagagagagaaaaatgacctaatcttgcaagtcagacactgtcacttctgccacattctgttagtcagaagcaggtcattaatggcagcctgcactcaaggggaggagaattaggcccaagctttttttttttttttttttttgaaatggagccttgctctgttgcccaggctggagtgcagtggcacgatctcccaggttcaagcagttctcctacctcagcctccggatcctgagtagctgggactacaggcttgcactaccatgcctggctaatttttgtatttttagtagagacggggttttaccatgttgttcagactcatcttgaactcctgacctcaggtaatctgcccgcctctgcctcccaaagtggggattacaggtgtgagccaccgcactccggccaaggccgcacttttgaagggaggagcattaaattgtggacgtattttaaccaccatagtaggcctgactccacacctactaaatcaaactctctgggtatagtaattttcatttttaagattctctcaaatgatttttatacacacttaaaatagaggacaactgggtatctagaagtaaatgaatgctatcatggcactatactagtttatttaaaaggccagatgtttttcacatgtttagcattctaaatatttgaggtttgtggatgaggtcacttggaagtaaaaaaaaaattttttttcaggtttgcgcttaggcactaaatcatatactaggtaatatagtacactctgctcagactgcattttatctggatgggcccttagctttttttctgttgctcattcaggcagatgagccccactctaatgtagcctgtggtatctgaccagctgctctcagtgcatatagcccaagcaggagctgtagctcctgattagaaagaatgaagtatatgtctgggcagggcaagccaaaagggattctgaggttcttgtctcaagatccagggtgaaccaggcaccatctgatgatggtctttggctcattggctcctacagctgcatactttgttaggagacatgaggggtacagaaccaggagtttgcaaagaacaatcatttgccttctggagcccttctaacctggacatcacacccttttgatgttaaatgacagacgtctggctctgtgtgacatcatacctatcttatcttagtgtacctcagctaacctcctgaggcttttggtggggaatcaggcctcattccccatcatagacataatttcctttttttttttctgagatggagtctcgctccgttgcccaggctggagtacagtggcgcgatctcggctcactgcaagttccgcctcccaggttcacaccattctcctgcctcagcctccccagtagctgggactgcaggcacccgccaccacgcctggctaattttttgtatttttttttggtagagacggggtttcactgtgttagccaggatggtctccatctcctgacctcgtgatctgcccgccttggcctcccaaagtgctgggattacaggcgtgagccaccacgcctggccgatcatagacatcattttcttaccttcccattcacattagctcttagccatctgaatgcatgcctacaaggaatgcaattggttgcttaagaacggaggaaacatgttatggaaatctatacttctcttcaaatgtttgtaccactcacctacccaattcccttcccaccccaatcaaaagacaaatacccatgctcagaacctgggggctcacattttacctgaaattccacaagtaacagaagcacacatttaggggataaaaccctagagagagagtaacacaatcctggctgccatctcagaacaagagagcattgtacccagagtccatgatcacatactggaatgactgtgtgacggagctgacatgccccaataggtacaacagattgttctgcttgtaaccaatcaataccacaattaacaaatatttattgaacaccccggaagcaccctggtatatactgtcctcatcagctatttgttagaataacacgaaacctcctgatcctctgtctgccttcaggcttgcctctgccccaataaaatcaattctctacatcaaaaccagagtgacttttcctaaaatatacacatttgaccaggtcatttaccttgaaatgttctggttgatgttcagcatccagataaagcccacacttcccagcatgacctaagaacctgaccgtgtgactctgcttccctcttacagcttctccacacatgttccagcgtccaggcactctccactcctcgtgcctcccaccatgcccacctctcttgtccttcccatctttatgtgccacataacagcggctaagagtgccggcgtcagagctcataaggctttgattcaaaacccaactctatgacttaataattgtagagtcttgggtaaattactggatgtttctgagcctcagattcttcgtatacaaaaataaaccaccagcctcacaggattctcataaggattaactgtgatcatatttaaaatgtttagcacagtgcctagcccataattaagactgagtaaatattgctattgctatattgatgtatggaaagcccttggcacacagtagttgtttaattaaaaaaaaaaaaagatccttgtctccgggagcctcagtttttttttgatcattggaacttctcagtgtgacattcagagtttgatataggagtggggatggcattggtgtgggtagagaactagggttttgagggaaagagagagaaagttgataggaggagcatagatgtaaaaaccattgtgtgtttccatgtgatcttccttccgtttgaatatgactaaaaatgtcattcgttttggggcagggaaaaatggtagactaggattcggaagaaactgacattctgacgttgagtaagtcactgctttgcgcctttattagttcatatgtaaaattggttcatcagatactgtttttgagagctttttaaagactagaaaacataacgtgaaataaaatgacaatattatacccctaattctacatttacagcatattcaacatttttttgaaagcaacatttttgtttacacataacagatgctgaagcacacagccccctagaaatggaggttgccaggaggataaagaagatcatgaatgctgccagtgtctctaatctttgccctcattccttgtgtgtctctcatttgagaagttctcacctttcctgggggttctctggccagagtgtttttactctgcaccactctacctgccgttgactgggttaccttcataaaagaggaatctgaagggccttatgggaagagtactgctggtggacacatggaatcaggaagcatagtttgaaatctagcacagattaaaacttgacctaacactcaaaaggttttcttctctgtgatctagggctctctgtggtcaccatattgcatcactatgaggtttaagatgaatgtgtgggtacctagcaaaggtctggcatgtgatggatacaggacagtcttgtcttttcctacttggacacctgagatagttccccagtgtaccctgaatatctgaatccaaaatcttcagtcaagaaggagcctctacggactagatccaagcctccctttctgatcttatttctattcattaccttcatgctccccctcccgtccataataattatcctccagactcaaggcccttcacgtgatttttagtttattacaccttagcttttcctttcttctgtatagactttgctgtacctgcaataagtgatacctttcccaggtccatgggacttgaaaatcctgtttccatcaagcttttccgcaaaccacccctcctcaccaggtgggagccatcgttcattccctgttcccccaatgcatgttgttttgcttctattatagctcttatcacagtctgccttgtagcatagtcatttctgtgtgttttccctctggattcggagcccctggagggcaaagactatgttttattttatgctgtatttccccacccccacagtgcctagtgcagtaggggtttggtaaatactgcttgaatcaatgcatgaatgaaattgcctctcctagttctgtttgcaaggctgtaatgcagaccaggtgaatgtagaattttggcttactggatttagtttagcataggaagggagttttccaagaagcaatagtggttttgaaaacagaaattgcctttaatcttgtggaaaacatatgccagccctctccataatagtctcaattacaggagagcatcgtgttactgtaaaaacacaaataaataaacccatgacaatactgtgtttgggagataaaaaccacataaaagccatctttccccaactctccagcatcataattagggtatttctgggaggagaaaaaaaagacaccagcaaaaaacaagtgatactatgtttaagaacacttcttgctattggcaagatgggagtagggagttagattttccatacagcacaaatacaagggttcttcccagctcctaccaggcttgatgctatatagattacactgcatgataaatttgggcactagaggtgccaaagatggtggcagaacctggagggcagaaaatgtcacccagaaggtgatgctgtgaaatttattgctctgccacactttacctaaacatgtcctattattctgaatgctgggtcttcattggctcagggatgcccttggtgcgtccgttgccatgggctacaactttcaactgtattttgtttattgctggtcatttaagtctctatctggtttttttttcttttaacttgagggctccagatttaggttcttttgaggtaagagtaggaatgactttgaaatattgcctacttttgtcagtattagttaacaagcactgagggctgaatgacactgaacagaacccagccatttctcagcacctctgttgccactaccctggtctgagttgccatcatgtttcacctggactgcctcagtagcctcccacctgacctctttgctcctactttgcctccctgcagagtgttcttcactcagcaaccagagtggcccttttaaaatgtactttagatcatatcactcctcagttcaaaatcctccagagtgcctcccatttcactaagaatgcaattcaaagaccttacttaccatggcctacaagacactgcacggtctagtgcctgctatctctcaccccatctcctactatccccttagattaatcctctctgacccttcagcttgcttgctgttcttgaacctggtcaagcatttcccaactcagagtctttgcattattgttctcttagcctggaacatttggtcccagatataaacacatggttcatactctcacttccttcaggcccctgagtgtcaccttgttggggaggtcctgtccacctgtatttctattgctggagcaagcacttaggaagtctttgttggaattgtgaataagcattgcccagagattctagcacatttggaaaaagagagtgtggtttagaaggacagtggctctggagttggagcagttgggcactgctgggtttgcctgccccccattggatagatggctgatgttgggaaaattatttaacctttctaagcctaggtttctctactagttaaatgagattatgtctatctctcagaatcgttgtgaagagtaagtcagataatgactgcaaagtgcttggcaatgagtcttgtacacatactgggaggcttcctaaataccacttctcacaaatcctacttcctgcttgtgaaatcatgttatatggaagaaggggagtgtctgaaaatggtttgaatcttgtgtgtaattctcaagtaccagcaagtagttgtgattatatttaaagcacctagccctgtgcttggcatatggcaggccttaataaatacccaagtcttcctgcttttaatcatcagacttagactctgggtgtgaactaaggtagctctgtgggcacacagggattttggtaaacagaaaaagaagtcagcagctgaggtaggggtggttcacagtcttgcttgtggttcaacagggactgcatttatgaaaatggcaagtgagcccagggcaattggaactttgggccttgccagcaagtgtggtatttcagtttacatcctcagagtaagtacaatttcaccattattccattgaggctctccttgccaagaaaaacccattgtaaatttctggtttaaaggttctgcagttttagggagttgtactttttgttgctttaacattttcttggcaccacacattttaagctgcactggcttaccttgtaaatagtatacacattttgtgaaaagctgaaccacgtcatttgttttcctatgttccttatgggaaatggtgatgcttctgccccactagttcccctgggtttctgatcaggcagtttggagtgagaaaatgagactgagacaaaatatagattgtcagcaagagattggagctgtattcacaaaagcactttgtggacatggtagagccaggcaggagagaaaagtctgtggccggcagggtgtctgtgtgacgtggacccattgtgtgtatgggctcctcccgctgtaccagtggccagctcccagccaggccacccgggcgagggcctctgaagcagagagccctgcacagtctggagccgctctaacccagtgtactgaataggactccaaagaataggagctgtgttccctttgtcacctgcaaccctgctttcagcctgcacagtgaatgtgcacttgggggctgaattggcacttggaaaaatctgcaggaactttgtgtgtgcacagcgtgtgcccagcggtatgggcgaatggagcgtgcacgctggagatgtctgggggctgggtgcttgcagaggagggctgacctctttatgctgcagggtttgccaagaatgctccgcccttgacagtgttgtggccaacagaaaagcattcgtggcatcttaatgaaaggcagcagttccttttttcaagaatgataggcattcttttcttgagcgaggtccccatttagggatggagagagaagccaattatttttcagttaaaatttattttttaaaatagtgatgcctcagttgtaaattaccctggctttgccatgaagacatttacagctagccttctgacttggttttaagttgctgccttgtagaataataaaatagtagcccaaactgtgataaggcatcaaagactttcatatcctatctgtgtagctgatgtgcgttgctccatagctagaaaatggatatattttctgaaagggaatgggtgtatttccctttaccttgcagcttgcacataatcgaacacttcttttattgaaattgggggttttctcccttggacttaataaggagatatagatatctatatatctatatatctatatctccttaagagggagtttcataagttcaaaagttgtcaggttgaaaggattgaggtattggaaacaacaatcttaaagttacctttggaatgatagatctttgaaaaaaacaggtagtttatagtacattggaggaaatgctctgttgttttgcatcttctccaggcctctttatgactactttttttttgagatggagtctcactctgtcgccagactggagtgcagtggcatgatctcagctcactgcaacctccgcctcccaggttcaagtgattctcctgcctcagcctcccaagtagctgagactacaggcacatgccaccatgcccagctaatttttgtatttttagtagagacagggtttcaccatgttggccaggctggtctcgaacccttgacctcgtgatccacctgccttggcctcccaaagtgctgggattacaggtgtgactacttttttaaatgcttcaatgaaacttaacatgatgacctacacatttcagctgcgcatatgttctacctgttaatggtgagatacaacagagccatctttgactacttcacgctgtttactctaagaggcctgtatcattagatgacttcctgttggaagcagtaatttgtgtttggacttgggtgactgtcagtatgaatctagccaagaaaggtcatgtcacctgctacacagtttgctagagggaatacaggccaagccttttgcctctgaaatcaaagtactgtagaaggtgtaatagaaatgatgcctaggtttgtgtattcagggcctgagtttctgattaaagctgttaacaatgggggcaagctttccccgtgggagacaggcttcttggatctaaacctttctgacatctcaaagctttatttcctgatgatttctaaaagggaaggagccagccccttgaaattaaaatatcgacttacattccgttctccccagacggaagaatattagcagattgaatcagttggggttagtactttcttttatgtgttaaactcagttattctggctaagatcagatttttgtctaggacggagctgaaacacatgcggaatcttgttggttgagggctggaaacgaaggttggcttcacacaggttgcttctccaaaccgtaggtaagctcttcggccccgtgcacagcattcacagctgctgtctgctgcgctttcttgctccatcctgtctagtctcagaagtttcatggtactaatatcttggatccttacaaaggactgacttttgacccagttgactgataactatagagtactttacagtttaccaagagctttccttcatgtttgctctttacatcaaaattacaagatgggttttattatccacattctttttgtagatatgagggccagagaggttatgagttagccaaagtctatccagtaattgacagagccaagattctaggctgggacatctgattccaaatctactgctcttcatgctcctttatactgcagctacttacctgctcaaagtatgtcattcactcattcgttcagcaagttcttggtggcatgggctttgaagccagacagctgggtcccagtatctgctcactagctttgtgacctctgttacctcttggaacctcagttctttcatcagcaaaatgaagatagtaatagtacctatctaggaaggctgttgtggagtcctttaaacagtgctctggacatagcaaatactccataaatgtttgccattcttcttcatcatgggctcactcagtggtacagggactccacaccagtgacagcactgctgttgaggatcacttgttctgatgcaaatatgaaaatagaagactgacaattgcatagtaaagggattgctaagatataagcaggatgctggggaagcttgaaggatgaacagctgtgttttcgattgccaagaactcggctctctagcagctcacccttgttgcctctacccctatttggtcacattcctgtcttactcattccttgctgaaggcagtatttaatgtgcaggggttttatgggtactttgtgtataacctctttgaggaggaagagaaggagagtatgtctggctaagggaaccttagtggtcatttgggattataagacctatatttaacagttggaggactgttcaagacaaaatagattccaaggttctggtgtgcagtgttctgtctgagcaccacaggatatcatatgtgagtggcttccagtgggttgctgagggaggggactttgtgggggaagtaggccttgagttggacctgaaagaaatgaggatttggattatgagtagcagaagcgtggagagctgggcagaggtggagttatgatatttaaaccatggcctgccttgggtggcgggacagccctgcccggggatgtgggtggtccaggaggcaggtgctgtcccctcctgcatgagaacctgcctctggaccccaacaggatgcacacagcttatccccaccctctgcaaagctacctaataatatctttgtgtttatggtaatgttttttgctgatttggtgggagataaaacctagagagacccacagcatggatgctaggtctgagtgggtctgtgagctgcaacctagctgcagcccctttgtttgtgagctgtttgcctgcatttaaatgccatttacataaggagctgtcagagttgagttggcccatgattattccttgatgtatgttgaaaaaagagaagaaaagaaaaccctggctaatgaggagctgggttccttttctccattgatgacagcttcctttctgatctgatggtccgtcagaaactaaggtggtgtgtgactgtggggttatgtccccgctgaagccgtcttttcctcagagttgtaattgatggggagacctgtcacttgttatgctgatgctgtgcagatttttgtgcagctgccagccaagagagttgtaggacagcatctgattgggtgcaggttgtggcaaaaatgataataaatagagagctggtgagggtagattttgattgacccgagattgtatattattaaactggagtctgcatgtacatgtcagtttatgaagaaccagacccataatccaactttaggactgtggcagttcgggtttattaaatgtgctttatatcactattaatattgaggagcaaagaggaatatctgtaatcttttaatctatgcaataatggtttggagggagattaccagatacattggactattgtttgtctataattgtattcagaactctccgaagcattgatttgtttctggcatgctgatttggctcagcagtctcataaagctcttttatagtcctctttgctttgtgttttccaaaaataattggagaataataataatgtggctggcgataaagaagagagagtaaggttgaaagcaaatttctagccgagtggatagccataaacatcttctatgctcataaacacctgggtctgtgacctttgtgtttataagatatttatcgcctcatgggctctctgtttgggggttaccacttcagtgccttgtaaaatttgattgtgtttagtaagtagattctgaatttttgctgagtagggaaaaagtgcccctcacctttgttttctttggaacaaccaatctgccaagaggggcagatctcaccaaggacaggagcagagagcttgggtgtgcctgagttttgtggaaatggtacagtgggacccagtaagggtatcttttgtacttgattaagtggcttgtgatggaaatgacttttgaacggaagggaattgtgcaacacatcaaataaactcaagcagtgtcgatgggttttccttttccagtagaaatggaatttttgattcaagtcgaggaagctttcttgggatttggatttttgccacttcctcaccctttcttcccatttccaaaacaggcctgaggaaatgagccagagaaatggtcaaattcagtttcattgactttaatacgaaggtatgactaagtgctgcaaaagcacagttgtcttctatcttcagcagtcctctaaacatttcttggggaagttttaggcactttgtcaacctctattgtcctcctgatggtgttgcttaattactcttgaaggaaacagttggattcctgtgaactgatgacaggtgtatgctgagctgcctgtgtaaactattggctgcctgttcatgttgtgcacagtggatcagaggcatatgggagaatgtgccaaaacgggaatcttaagggagttttttaaaaagtaaaaattgtttgcttttttgctgtggtgcgaacatggctcacttccgccttgacgtgctgagctcaagtgatcttcctgtgtcagcttcccaaatagctgggaccataggcacatgccactgagcctggctaattttagtgtatttttgcagagacagggtcccactatgttgcctaagtgggctcaagtgattctctgtgccttccaaatcattaggaatacaggcctgagccactgggcccagcccccagtaagctttattataactcaactagcttcattataactaaagtatgagccagtcttgaggtgtataggacctatatttatcaaaggagactgttctacctaagacttagtttcttgtcctatgaggttaattgctgctgcatttcatggagtttatgagatgtgcttccctctgcccttcttcaatcagatggtactgcctgggagtcatatacatgcaggactgataaagagcggctcccacagtggcagtacctacagtggactgtgctgtaggtaaagggaagctccatcacactggcatgtgggaactggactaaaaggccacgaatcccccaacacttactctctgcccagctttgtgaaatacaaaataattatgagttccagactccagagatgctttccacctagttggggaaggagaagtttaggtcagtggttctctaagttggtccccagacaaggagcaccctaattctctggggatttgttagaattgcagattttggggcatcgcccagactaacagaattggaaaccatggatggtgttttacaaactctgcaggtgattcagatttatgctaaagtttgacaactcctgctttaggttcatcagttccagggggaataaatgagtaaacaaggcacatagaattaagggcttcctatagggcacagcgaaggagagaataaggtgctttatagcaggatgctaagctggactgtcaatcatgtgggaaaggggtcaaagactggaagagcagggatcatcaaggcagtgtttgctggggagagaagttattgagccaggttttgaggactgaataggagagaaagaggtagagtagcatgaatgagctcagatgtgatagggagggttctgttccttcaagagcttagttaagtgtagtgaaaacacacacacactccggacaagaaaaattaatgtaaaatcaactatagaacttaggcaggtttatgaagaagaaaatatattcctcacaagttggattcctgtgagttcatctcttttattacctctggcaatggtgcaattaattggggccagggctctgcacctggaaaggctttataacgtgagattctcaagaggaagattttatttgcctaaggctactactttaaaagtgagagaggcactcatgaaaattaggggtaactgtaaaaagtgataagctgctcaacatagattcagtgcccagtatgtataaagtgctgtgtgtatactggagagagggaactggaatctaacttggggatgggggtggatccagaggagtagagatatgaagaaatacacatttaagtccagtaagtttttcatgcacctgtagtcctgagaggtgaagccagctggacgtcctgggtcgagtggggacttggagaacttttctgtcaagcaagaggattgtaaatgcaccaatcagcactctgtgtctagctaaaggattgtaaatgcaccaatcggcactctgtaaaatggaccagtcagtgctctgtaaaatggaccaatgagcaggacgtgggcagggacaaataagggaataaaagctggctaccccagccagcggtagcaatgcagcactgatccccttccatactgtggaagctttgttctttctctctttacaataaatcttgctgctgctcactcttagggtctgcaccacctttaagagctgcaacactcaccgcgagggtctgcagcttcattgctgaagtcagggaaaccatgaacccaccgggaaaaacaaacaactccagacgtgccacctttaagagctgtaacattcaccttgacgtccaaggcttcattcttgaagtcagtgagaccaagaacccaccagaaggaaccaactctggacacagtccaagctactccagaggctgaggtgagaggatcgattgagctcaggaggttgaggctgcagtgagctgtgattgcaccactgcactccagcctgggcgatagagtgagacagggtctccaaaaaaaaaaaaaaaaaaaaagtctagtaagtttttgttttcctttaaaggcagaggggagccactgaaggttattgagcagggaagtaacaagattagagttgtaatcatgaatctaattaaaaaatcagtgactggagggaagtagatgggttagaaggctagtctagttttaatactgtgaggcagatgagaagggcttgaactagcagagttctagaaaaatggtgatgtaagcaacaatagagtcatattagttaagggtgagagggaagaaatatttacaattcactgtggaccagccacttatgcctgtcattggtagagcttaaccatcacaattttagcaacacagagattgatttttatagaaggtccaaaggatatgtagcttggagacatattcaagatttgactcatgctgggtgttatggctcacacctgtagtggctcacagctacctggtaggtcaaggtgggaggactgtttgagcccaggaattgggaccagttgggcaacacagcaagatctcatctccaaaagcaaaagatttgattcaagcctgcctgcctgcaaagcctgtaccctttttgctctagattctagactttggcgaatagaatgatacattttgtttataattggacagttgttgatcttggcagaagtgttgactgctgggaggtgttaagagaaaggaaaaagcagcataagatatggaagtttgtttgatgaaactgtatctcaaagagtttaagagttttagcacaggacagatagaatcttgccccacccaagatgatggaagaacaaaacaaagtctgtgctgttttctttgttaaccagagttgagagtggagtccaatccaatatctgcctagtgggagtctcttgagtcctgatcccatgagatcatacatatggctgctactcctgttgtgaggaaggttgcaattttagaaataaacctggagcttttgaaggtcctatttattacttcagcccacttactgccgaggtccccatgttttgcaagtgacaaaaataaatctaaaatggaaaactagggagaaggtgagagaaagtgtccagagaaactggggactttgagttgtttggtctaagctacttatttgcatttttgtctccacttcctagcaagcatattggtacttagcaatggtgggaggaaggcagaactgtaaaaaaaacgaagtcatcattctatccttacacttgagtttcctttcagcaacctctctctcccttgtctttgtcccgtctcataacttaggcgtgatgtgctgctgtatctgccttgctgccttctcctgagtggaagctgcagctacagtgttggttattacacctggcaattagattgtgcaggacagtagttggctaggaatggcataaggttgcatgcctcgttaaatctgaactccactcagcatagactcttgtagaagcaagggggatttgtttaggtaaggagcccttgaaaggagcctgcttgttgaactgtatgttgagcagcagtgatgaaaagatgcctaaacatgtgtcccacagcagctacagtccatcagcattggacacattggtagatcacccctgctgttaacacaggtcttttcagcttactcgtttgtgtacttaactgttgagtgctcttttaattaggggcgactaacatcaaagtactatagttgtgccgggcctgctaatcaacaggtttcacttatactggggatcacttcagctttacaccaccattatcatgacattgatttttctgtgcacataaaaggaagcacttactgaatacaggaaaaaatcatgattgctaggtggaaaaaaaaacaaaaaaccagcaagaggaactcagttacccagggaaaatgtaaacgtttcatatgaacattgacagtgaaatggatttgatgagttttgaggtgattttgttagatactttgagagaaattgagaattctgtattccgaagagacagccggacttgaaactctagaggtatgattttgaccaagacctgaacttctctttgcctcagttttttcatctataaaatagggttagtaataataccaacctcactgagatattgtgaggattttgtgagatattgtgagattgaatgattagcttagtcactggatgtaagtactcaaattatagctattaataagtgtgatacggctgggcacggtggctcacgtctgtaatcccagcactgtgggaggccgaggtgggcgtatcacaaagtcaggagttcgagaccatcctggctaacacggtgaaaccccatctctactaaaaatacaaaaaattagtcgggcatggtggcacctgttgtcccagctactcaggaggctgaggcaggagaatggcgtgaacctgggaggcggagcttgcagtgagccgagatcgcgccaccgcactccagcctgggtgacagcgcgagattctgtctcaaaaaaaaaaaaataagtgtgatacttaatgtcataaatcattgttattatttctgagaactgatatcttgtggtccattgttgtggcagaagtataatttatataggaaccgaaaccagccctcgatttttttttttaatcgccgatcttggttgggcttcactatcattttcatcagcttcacaacccctcagttctgagaaccctccttgccatacaagccactggagtgtctgcgtttcctttctgtggacattgtcacctttcccttcattttggtaaggccatggaaacagagcaatcagataaaagacctgggcatttggcactttcattggccatacttctccttctggcttgagtttatatgtggtttggggtagttactggtgaaattgagctttgcagctgtctacttaatctgcatttcctgatctgctttggctggcaatcaaaagctgtatctatttcggagattgcgcaataagacttttaatgacaagttaaaagacaaagggttggtgggattgaaccttatgcagaaaatacttcactatacttcggtggctcctgtttactggtgattttgtgtggatagtaacttaaaatcaagaaacatttttgctaacatatttcctgggccattttagaaagaaatttctttatttagccagtaagtagagctttctttagcgtttacatagttatctttttaatattaatttttgcaatccatatgaatgaggccacatgtcctttaacaattttagacctcttctgttatgcattactgccatctgtcagtatgagagaaagcttcctggggcagaaggacttaaaacaatggttctcaaccctggggtcacattagaatcactggcagagcttttaagaaattttagtgcctgggccagttccagatacatagttgctctgggatggggcccaggcattgatgtttttaaaaaactccctaggtgattctagggtataactgggctgagaggctctcctccgaaagcactgtcttaatggaagaaccagtggcatgagaacagttctgctttttctcagcagtaaccttgttgtcttccattgcagtgctgattttgacaatggagccatgcggttgtatttgggtagcggtttggagggtaacaagtgtgtcttttgtatctctgaatcctctgcagccagtctagtgcctggcatatactagatgctcactatcctccacttcacttcttttggatgactaaataatggaatggagcccagatgtactagcctttttacttaatccctgagcctttctccttcagtggtccgtaagggagcaggtccacaagcatacacttttattgttccaggaggaggaagacgcccagcttcggaatgcttgaggcataaaactgatccttggttaagatcagcagaggcttgctgtgtgcaacataaattgtcaggtaaagaagcaattaacgtagtgccatttatttcctctttaagcatctagtccttatgagtgttgtggttctgcactccaactggaaacaggttctctattgccctgttttgctcttaaacacagacacctttttcagtcaagagaattagggccttttaaaaactcttctttctttcttttcctttttaggtagcccatattgaatcaggtcctgcagctatagttattcatgcagggagaattctatgaacacaggggagaatggcctgggagtttgataatttgttattttttggtttgtagattgagaagtatattaagtaaggataaccccttatagttagttagttattttatagttttcctgtccagaaggttttaatctctcacacggctgtggactggcaaagtaactaattattgtctccagtttatggataaaaaaatttaagatgcggcaaggttaagtgacctgcctaaggtgatagacctgggccttgaatccacagcttttgactgtaaatcccttcagtacactgagctttggatagtacttttgcttggattagaacaccctataaatgtgactaatggcatctcagggttctgtcctggctgtcatagttgaatcctttatttgcattgcatgtgcttgcttgtgtgtgtgcgtgtgcaactattaatattaagcatcttgccatttgcctctgtagagcacagttgatagacgggaatatacacttgatgtagtcaagagagtgtcatcttttattaagaattctgatcttgcctctccaaaatgcctactttcacttttagtctattgtaagtgtgaatatttgtgtgtggtattttattcctaggcaaggtgtttttctcagtctatgttgtgtgtctaggatgataatgttaaagcttaatatatttagttttggaagactacatttttctggggtggtttatgagttgttttccttcctccaacaaattattgagtgtctagtatgtgttctatgctgtctacctttacttccatctcaaggaagtctaggataaaaataacattgtttatctgtgaagggataaagagtcaacacccatttcatgtcagctctgtctttattaggcatttggctattgagctttctaatttcttgacttttgggagtgtttctcccagttaccagacaggtccagggtgggaaatgctttccttgggccccagaactagctcatggagaggtggttgtagcttctgggaattttgaaaagagccacacccaggaatctgcttggactatgtgttctttctgtcctgcctttactctcctcttttctccctcttataagcaaagcgtctttttgcttccttgcccccaatcccagagagactgttaacttatgtttgcatgtaaggagaacagtcagagttaaggatctcaaactcaggaaagtggtttttgtactcaagagctccctgtgtgtttgcgcagcacacttacctccatccaggatgcacttatcctgcgtagatggattgtaaccgtgatagagggggaaaaagaagaggggaaaaaaaaacccctaaaaaaaccctggattctgaagatggctgcagtatattcttcaatagaaatttgaagcatgaagtggattttagaacaccacatgaagctcttcttacttaaaacacaagaacttaaaacttggccaggggaaaggtgtagggaggtggagaaaagcactccttccatttaaggggaagtaagcacttgacttcatcaattgtggttaagataaacaaagcttatctttttggttggcatcagaaggggcatttaaagtctcatgaaatgagagaagggttgttctgttccttatttactgtacttgaacggagtcactgaaaaccttgatgggatgtctctatgactgctcattcctagttgtctgcagcactgtggccagtgaatatgctggttcccacagaggaaggcccacagcatggtttccttcctcttcttttaattttgcctcgtgtcttttgtagacgagagtgctctgcagtaattcttttgtagaaactgccatgcctcaaatcacattacataatacaggctggggaccagcattccgtgaggacttgatcaatgggttgggaaacaaggttgatagcattgctgtggaggagatgtcaatgcgaatttgtcagctcacctcacatccttgcttgcagaactttgattttatttaggtgttcacttccatgtggacttgagttcaggggggtacatcttgattagtctattccagtcattatatttctactccttgtcagtgatgggcttaggaaggtccaggtctggctggctggacatgaggggaaatcttgtgtgggcacttctagaaaacgtttccttgattttgatgaagagaagtataatttctatctggttgttgtctgcatgtggtgctttgaaattggcagttgccatctttgaaccgtgagccagcgtaagaggacaggcccacatgcaggggacagcaaagctgtacaaaagatagatactatctttgatgatattgtggagctgttgaattgatcagcctgagtccattccattttgggacttcttgttatgtgtgagaaagaaaaatcacgttttaactattttggctggattttctgtttccttcagtctagtgtattataactgataactatcttaccccattcatacaggatggtttgagataaaattagaaaatattggaaatgcttttacacaagtatgacacacacaattaacatagacattaacataaatattatattgtaatgtccagtgttctcatactttgcttccatatcacttctgctagcattttctccaaagcaaggggacaggccatgaggatgaaaaacagccatttaaaaactgtcttgggggttttcagtattctttctgtaagaattgacatgatacataactcctaaaacatagtataaggcaaaaattattctttcctgatgaacttgtatttcttcttattggaaagtggcaaataaaataatccagtataggaggcatcatgctacctgacttcaaactatactacaaggctacagtaaccaaaacagcatggtagtggtaccaaaacatacatatagatcaatggaacagaatagagacctcagaaataggaccacacatctaaaaccagctgatcttggacaaacttggccaaaacaagcaatggggaaaggattccctatttaataaatggtgctgggaaaactggctagccataggcagaaaactgaaactgaaccctttccttacactttatataaaaattaactcaagatggattaaagacttaaatataaaaccccaaaccataaaaaaccttgaagaaaacctaggcagtaccattcaggacataggcatggggcaaagattttaccatgaaatccccaaaagcaattgcaacaaaagctaaaatggacaaatgggatctaattaaactaaagagcttctgcacaacaaaagaaactatcatcagagtgaacaggcaaccaacagaatgggagaaatttttgcaatccatctgacaaaggtctaatgtccagaatttacaaggaacttaaacaaatttacaagaaaaaaacaccaccaccaaaaagtgggcagagggtatgaacagacacttctcaaaagaagacatttatgcggccaaaaaacatatgaaaaaaagcccaacatcactgatcattagagaaatgcaaatcaaaaccacaatgagatgtcatctcatgccaagtcagaatggccattattaaaaagtcaagaaacaacagatgctggagaggctgtggcgaaataggaacgcttttacactgttggtgggaatgtaaattagttcaaccattgtggaagacagtgtggcgattcctcaaggatctagaaccagaaatgccatttgacccagcaatctcattactgggtatatacctaaaggatcataaatcattctactataaagacacatgcacacatatgtttattgcaacactattcacgatagcaaagacagggaactaacccagatgcccatcagtgatagactggataaagaaatgtggtacatatacaccatggaatactgtgcagccacaaaaaggaatgagattatgtcctttacagggacatggatgaagctggaagccatcatcctcagcaaactaacacgggaacagaaaaccaaacagcgcatgttctcactcataagtgggagctggataaggagaaagcacagacacaaggagggtaataacacataccaggagcagtgtgggaggaggcaaggggaaggagagcgtcagaacaaatagctaatgcatgcagggcttaaaacctagatgatgggttgataggtgcagcaaaccaccatggcacacgtatacctatgattacataggtatacctgtacattctgcacatgtatcctggaactttaagttaaaaaataagtaaatacataaatacataaaaattcagtatgttttcttgttgtcttatttcaccaatgagctcagatccaactttaatggttaataacactttgtctaaaattcctaatatatcttctaatattttctagttggttttatttattttagttattttaacaacagtgagtgatctgtatcacatcctcctggaagtaccttggatttcattataactgaggaagcgtttgttatttgtttaaatgagtgtcccagatagcttgcaatggagcatatttatttgtttactctcttatccattcactacacatttattgagctcgtactaaaaattagccagacacttaaatcgttttctttggcttgattgtagagctcataaacaaaagtactaggaatttagaattgtagatcacagagcattagaataggggaaagtcatttttcattgttgagcctgaggagagtttcgaaggtgacttgaaggtattgatttgaggaatgccgatggttttcatcttcttttcccatcactaaactaagtatactcccttcagaggtagagagccaggagacctttatagtagtgaaaggacaggaaaggaaggctttcatagacagcctggtactggagtcagtattcaacagtgaaattctggggtatagaaaatagttaatttatatactttaattcccacctgatccccactccccaagaaggttggaatccttgtttttcctccttttggaatttgctactttgaagggtttttttcttttgaaggaataagaacagtctgttcattgtgctatttagtgcaattagaattagggagcaatatttgttctgtgagttatctaccctgacagaagctctgatagaagctcagaatagttaactgccctcatagaggcttggggcatcattgctggaaatgagatgcctaactccaggacttcatcctgtggactgcagaattaaacggaaccaaagaaaataagcaacaaaaaacagttggaacagcttctcagtggacttactgctgccagtcttggtggggaagcaccagtgcttcttggactctggctactttgatcttcccagggtgctggagaacctggaaggacccaggttgtctctcctatgtccactgtaagccttggtaagaagcatgaaccttctgtaagccaggacccaactgaccttttaagatttttttttttttttaatcatctgaacatgctatgccgttgtcttggcattgctttgatcccagatgtctcagttttaaagagcacctacactaagtggcaaggagaaattagaattatccatattgatgatgaaaaataaacctcagagggcttccaattgcaccctaattcttctcccttaggatattgagagagtgaggtgtagaatttaaagttaaaaaattttacatcactttacttaataattgaaagttacttggctttggcccttggcatgatttaaatcacaatggatttgagagatgctttgtcattgacttaattttcagggttttaactcattcagtaagttggcttggcagccctaagcagcattagtattttgtgtgacattttcaaaatatcctttgaacctatggtaatccctaaggcagccatgttctaaaactcagagaaggacctccccaggggcttgaaatacctgtgtttcctcccctcaccgacaaccccctaccctgctccccatagcaatgttttgaggttgtgtgatctggatctgggttgaactcctgcagcgttttaaaccttttgtttctttcttctttaataacaacagtgtttcttaccctggtcatctattgagaagtgtaggtgaaagtaagcatcaacagaatggtgattttgaatatgggaatgggttcttgggagccactgatgtacctatagggactggggatatgattggtagttctagaatgacgttgcagttgctctatacatgacccatcacgtggaagatcctgacctcagcagcacacagcaagcatgtaatagctgcagagaataatgctgagcactagtcaactggtaagcattacagactcccctgcttctctctcccatgggtcaactggtgttgaataacagggagactagtactttggacatttttacctactgaagttgactcatgctgttcctttagaaggctaataaatttttggtgattaactgaataaattaacaacaggctaagagaataattacagacctatttaggaaatctagttcttggttttgcttggagattcttgccagaactttaccttgtaagttagatatttttacctgttgcttctcagaaaaacctacaagcatactcttaggtttataccttctatccctaacaacaacaaaaacattaactgtaaactgcctcctgttatctgagggtaaagtcgtaaaaatcaaagaggaattttgaggagaaagtcttggtaacagaaaatactaattagttgtctgtgttgtgagatgtgttgcttgagagtgtctgagcttcagagaatgtataatttccctccttgatgtccacaaggagcttctaggatactttattaaaagacgagtaatcagttattattcttcgtaggtatatctcaaactgcagctttaaacagaatcaactagagggctttgttacaatacagattgctggactccactcctggtggtatggtaggtctggaaaagggcctgagaattaaaatttttaggtcctccagtgatgtctaggttaccggtccgggaaccacccattaagaatcactgttgtatctggtcctctgcctctttctgcacatcttatatccatgcagcaggtatgaaaatgagctccccaaaagcattcaccttcactgttgacctgattattatataattataattggatctcaaccttttaaaaggccaatcgtatctgaactacatattaattataaatcttagtgaaagctctattatattatctcaatttttttttcttttgagatggagtctcactctgttgcccaggctggaatgcactggtgtgatcttggctcactgcaacctcgtctcctgggttcaagcgattctcatgccttagcctcctgagtagctgggattatagatgtccaccaccacgcccagctaatttttgtacttttattagagtcggggtttcgccatattggccaggctggtttcaaactcctaacctcaggtgatccgcctgccttggcctcccaaagtgctgggattacaggtgtaagccactgcgcccggcaattatcctgatatttgatcctgaaaaatcttgcttgaacttgaaacttgtcctagaatgtctttgaaaagttcatattccgataagtgtattacattctacaacaattatgctaaaaggttacttcacagaaaattatatccacactcatgatagaatcatttggaagtttaaaaaatatggtcatggttggactccatccaagactgattgaatatgaccctctgggattgggcaccaagtaatatacaattttgaaaaatttccaagggattttaatgggcagctaggtcatgaaccactgcgataggccttggagagggaggggagcagcagggctctggtaagtcctttacacttgctttaacctgctgctctttccccttcccactgttaaactcccctgcacctctacgtcactcttctttacaggctggctagcgtcatcacattgtaggtcgttttctgtgggcttaggaaaacagtccaacagactgttaccctagtgcgtgcaatgaaaggcctttattcttagggttcaaattattttacaacgaaattgtttagtttggagcctagccagtttcatctcttctatactccaggttgatcttctgttttagatggtgttcctcactctgccttcttcacctgaataaaggaaaggcaggcaatgtttccagagctcctgagccacccttagtgctggaggcaggtttaggaaagagctggctccctcattgctaaacagaattaatgttgttcaatcactttattctggctctgtgaaataatacacaggaggaattgctgctttatgactttaatctgataaactacctgctctggtgtgttacattctgtgtgtgtttctctgccaccactgcagaataatctcagccttatgtgtagcaactagaatgcaaggttcaaaactcaaaccaagccttgatgcagacgtcaaataagaactactttagaatgctctgtgataatgctaggcacttagcatgactgctggggctcctaaaaggagccaggaagcagcagagcctgagaatcctataacatttccttttgagcttgggcctgaagcagccaaatgctgtaaccaaataaaagccagtttaccttttgcttttcttatgtcttcttttcttgttctcgtcttataaattatgttcacacttttccttttttcttttccattcatgcctttcctccgttttctctgtactccatgcatctgccgcctgtctgcttgcttggtttttcttctgtgttctctcagcttttcacttttggaagagtcaggaatcttgtatattttgagaattagcgaaacatcgtgggtatttatccaaagtggaccttgtacagtctcttttatgctcgtttttaatctcaccaatttctagaatctcactaatttctaggtttgttaagggacaacatggtgtattgctggagatcaagacacaaagagtaacagagcctcagagctcattaatggtggtctgaaacaaggaaaggagaattaaaataatgtccttaacccaggacataagagatacagatagagagatggcaaaatccatggcatatctgtgacggttttctttttttgtagaaaatatcataaatagatcttagaactctgatcttctgatttttcttaacacagtactctagggagaggccactagacaagatgaatcccatcactgttagtgggagcttagagggaattttaggtgagggaaaatacggagataaatgccatcttttgagataggtcttttgattcagtgttgaagatttgtgtcaagagactcccaaaccataatagatattgcaggccttccctttactgcctgttaacccaggcatgtgacaagagcaagatttctagagattgccatagaggaagaataatttcagtgactttgggaaagcctgaagactgatttagggtgaaaggcacatgtcattaaagagtttcattatagattgctggttttattaggaggtaagtggttggagacattcgtttcctggaatcatgtaggacatttaaagtgttgaatgctatatacaacaccccagaggtgaagaagatgtttatcaatttaggtgcacagatgtcagtctgattattgggaagagggtgaagaggtttgacagtatcagagtatggacacatttgagcagcagcagctcattgtcctagaacgaattgcctcctggccgtgatttattgacatagctgatggagggactcagcagaagccaccatttatctgtttcttcagttgaccattggaaagccttacaaaattatgtgcgtgagaaatgtcaaagtgacagatttgggttcaaaagattgtacacttttatacatccaccctttgcccttctttttggacttgagtattttagacaaaactaacattttcttcagcttagtataaacagatttctgctcagattagctgagaaggcatacaccatgttatccttttatggatgagtgatacatgtgatgtctttgtcaaataggaattgccctctgccttgtgtgtttggagagatgactggccacacctctgaagcaatcagctgtggccaaattaacataatatggtacctgtacataaaactaaatatagaacaattttatctttttgtagtaaggatactatattccgaagaattcatgtaagttgaattatttaaagtggatttagggacattcattgtaaagttaatctttggtaaatccttgtgtggtgattttttttctctcctcttttgcatccccatttgaaagcccacaatttaatctatttgggtaaggtagattcttatgtgattaaatcactccagtttatacgcattgaggagtaaagtcaccagactaaactcctcaggaacaatgacagagagttttgccatgggtgtttgggaaaactgcatttactttctgcacacttaaactctgtttcagtccacatatttgcacgcctaaaaaaattaacaaattttcacagtaacaatgatactagcgtttacttattgctcaaaagaggtattgaccgctatagtgtgtgtgaagttggaaactttaggatgatagccatagtttgtacttcgagctcactctagtgggggaaatagacaagaaaacccataattagtacacagtaaatgttaggtatatttctcatgtgaatgtgtgcagtatggtaactgctcgttagaggggaccctatagaattgattacctataagagaccttgactgcgcttgggatagttaaggaaggcttcatgaaatagcgacaaatcagggttagctcctggcctgggatgatggctaaaaggactaaagggcgagtctttgcctcagtttcttatttgaaaatgaggataataataatccaactttatagagattattatgaggattctgtgaaacaaatgcacatagatagttaggcagtcctggtaattgggaagacatcaataatgatgtaagttatccatgtccctagtcctttatttcttacaacaacaatcctttcaagacagtagtactttccctattttgaagatgctcagagaggttaatttgcccaaggttacccagctagaacttggtagggttcagctttgaatctagacgtctctctcctggttaccttttgttctctttatgctactcagggggcccaaaatgattccagctgcttcctgcttcattatccccctaagtgccccactgagaggagtctacaattgcctgcccctcctctccctgcctcctggtcttgccatgagtcactgctgagccatttgtgtcagagaggaaaatgggggcttgctattcacatgtagcaatttgctatgtgttcttgcttatttgccagggacaccagcagagaagcgttcatcaagaggcgtcatgtttgttaagggaccacatggtgtattttaaaagctcttaactctctctggtatcatcgattatgctttagcataagaaataaagtgacactgagcctcttattaataatacacgttttccatttaactttgactggttaaatctggcataaaatgcagacttgcaaaccagcctccctgggatgtgtagcttctcttaggctatttatgatgcggatctctgttgagcagcagcctctgcctgcagctaaggctctggactagatgttctcttttccttttctctcttgatggcatggattgttttgtttcacaaggctcatgttctagatgggattgtagctggtctactacaagctggtctagttgggattgtagattggtatggataaatactgaaatgggagctggtatctgacaactggaggggttatatatgtgcccccatattctgatcaagctttggcattttgtgcatttggcaaaagtcagtggtcaatatttgaagtttgcatgaagttagaagaattttgggctctgaatatgagatgacttagagataatatgtttattttacagataaagaatcaggcctaaagcgattgatgatgatgatgatgatgatagcagaatctctaacaatggttaagccagacactgttcagagtgatttttgtgttaacttgcttgatcttcacaatgactctgtcaggtagacagtattattatccctgttttacaagtgaggaaactgaggcacagagagtttcagtcatttgcccaagccacatagctggcaggtgatagagctggggtttgtacccaggctatctggatccatcaaaacctttgctatctgtgtatcactacactgtagcttgtccagagttacaaagctgggcaggaatagtccaggacccaaatcccagtcttttgttggctgaactatatttgttatttaaagattcttttagcagtggaactcttctttaaatggagatattactagatagcacaaccaaataaaaaaagtggaaacttagctgctgtggtttaagtgggataggccaggcattgaccatgcattccctttattcagcccttgctgtggcttctgagaaagccacatggagcatagttttattttatttattttaatttttagtccctacaacaagactcacagtagggatatgattttaaaccctggctctagttagggatatgagctccagattgctctcttttgggtcacaattaaaatcctaaccggcaacagatatttttggtcagatctggtcattctctctgcctccgtacccattgggggcaaactatgaagcttttgtagctgcattattgtagatttgcaggatttctgttcgtaatcagaatcgggtatgtgttagaaaaaggccttcctgagtgtatgaacccctttgcctgctgacagtctctgggctggagttaacattaacatctgcatgcccagaggacagtgaattgctaacttttcactggctttctttttgcttggacattttacagtgctccagggtcatcattctgggcagtacttaccttgtaagtacctgattttggctcttttctcactcactagtctgtgatctagtcttctctctgtgtctgcagagttcagtcccatttctggagcaaagcagtagctcagtaaatgtcagtggagttttttgaatcactttttattattccagattataggcatatatgtatagatcaagtaggctgaatatgacttaatccccaagtttcttctataataggaccttattttatctctccaagtaatggaataaagggatggaagctggtctagttggggttgtagatttataaacaagacattaatctgaagcttatattcttttagagagttacaagaaaacccaagatctccccccatccccaattaaacactttgttctttgtaaggatagtagagtagtaggagtgggggtattcaggaaagcaggtcttaaggcagaagaatcacatcaacatcccaagttctattcctcactgcctcacgaatggtctgctagccacctgcagttgttgttgttgttgttgtcgtgttttgtaggtaaaggaaatatggcaggagagtgaagtataagaggtccaggagcttggtggaggtggaggagaggggggatggggaaagataaagaggcagataagaaacaggaatcattgtagaccagtggttttcagagtgtggtccctggaccaacagcttcagtgtcagctgggaacttattagaaaggcaaatttgctggtttcactctagacccagtgagtcaggaactctgatgggggtgggcagcgtctttgaaaacctttacttcactaactttttccccctctatcttaaatattcccaattgttttaggttttagttgattcccatattatacttcaattgtgtgtcagtgagtaggtctgtattaaaggagaactgttgaggaaacataaagaaatctctttgtattccaaaaagcgtttctcagagttaaattacatgttttgttagtgtctgttgcttttgttcagattaagctctgaaacaaaattaagattctcgtcaaggcttgagcttattaatagctgtttcatttgtttagcgctaatttaaaatgtctgatatctgtagaggaagtgctttataaaaacacatacttgttaagtgttccactaggagaagcactgtgaagtccaaaggatgtggagattaggcaaataactgtggttttgttgagctctcttcagtgtaatatatgtgtgggtgggataagaacactgggcttcacaggtcgaagaggcttccactggtcagatttcagacaatttgtgcattcaagagaattactgcaactgagtgtaaaacactgaacaaataaaaattcttgaactcatagtgatgagagatggggtgggaggagagaaagagacagacagacactctgggcatcattggaggtgactatgatgtcaacttctcattctataaattgtaaattacatgaaacaaacaccctgtctttactgagaaactgtagttctttcatgattggtaagagaaacctctgctttacaaatggatgctaccaaataaaatatagaaggatacagaatatcagcatttgcatcctgcagtgaaaatttgaacaggcaagtgccgtcaatgcaaaactagttgaaagcatgttggggaacagaataatcttattagagaataacccacaaattaccagcaaaggggaaagtatacccttaacaatggcggtcaccaccttaacaaagtggttcaacttagcatcacagtggtaggatagcctgacagtaggagcttcctgatgtgacgaactacacagcatcaccaacaatttatgccaaaaatgtttaacctgaatctaaccaggtgtattaggctgttcttgcatggctatagagaaatgactgacactgagtaatttataaggaaaagaagtttaattggctcatggttttgcaggctttgcaggaagcatggtgctggcatctgctcagcttctagaaggaggagaggggttggcacatcacatgacgaaagcaggagcaagcaagagagagtgtgggggaggtgccacatacttttaaatgaccagatctttcaagaactcactatcacaaagacagcaccaagccatgaaggatccactctcatgatccaaacacctcccaccaccagcattggggattacaattcaacatcaggtttgggcagggacagatatccaaactataacacaaggtttacagaaaatagaagggtttgaaaaacaaattaatccacaccaggaagaaacagaccaaaaatgtgggtcattctcaagaaaactggtatgtctgatcttttcaaaaagccagtgtcgtgaaacaaattgctggtgggtattactccggattacaagagactaagggaacataacagtcaaattcagtgtacaaatcttgatgggatctggcttaaaaattataactgctgtaaaagatgtttgaggcagttgtagaaatttgaatatggactggctatcagataacattaggaacttaatgtcttaggtgtgatagtattttggttgtgttaggaaaatatctttattcttaggagttgcttattaagtatttcatgaaagtatcatatctgcaattcactttcacatggttccatgagagagacgagtgcatagataaggtgattttggcaaagttttaacaattttgaatctaaatagtaggcatatgggtgtttgttttatatttatatttatattcagcatagagaaagctgtgaattcaggaaaagtttatatgtaatttctgagatttctagctcatgcatgcatttctgtttgagaatgccttatctagaattttttatcaagaaatctgaatggtgtttaagaatatcttatctagaaatatgttggcatcttaatattatggtttggtagataaaatggatttttttaaaaaaagacttgcaaagaagtggatgaaatgctaatataagaaaattagattttataaggaacatgtgaccagataaacttgtcctaattattgtgagtctctttaaagcacataccttaggacattgtgtgttgacgcttttactgttcataacatattctttaagaattctctcagagccttaagatgatttgtttttgagaaacatctgaagtctcctgtagcttattctgatgttatgaagtaagtgactaaattttgatcacagaagtgtgtgacagggaagtagtgggatattctttgcccctctttgtgtcctgtgatgctggtggaaatttcaaaggaagagtttcaaaagtagtttactttgttcaaactctctagccctaaaccatcagtgacaccagtgagtgtttcttattttacctatttgggtgtgttagatgtattttcactgggactattcttttggtcagagagcctaaagttaagtgtttgagcttctggtcctgtgatctcagcaactggacttgattcaggtgctttgactcaagggcacagtggtagcatcaccaaaaatagatgaatggcagcagatccctaatggctggctctctgctggttgcccgtctcagctcaggacttccgagaggtataaaacctcactgatagccaggcataatggctagggtttactcagagatgctgggggcttgagtgtagtattgctctgttgtaggctgataatggagtatgtgccaggtgggggcaggatggtatccaggcagtgtgggcaaagggctgcagttagtcccttgttacactcagtgacaggtgactctgagctgtctggaagtaagataaagtgattcaaggataggatccatacctgaaagagaggtattcagaatagcatttgaagtcaggtagacttcagctcttccaatggacctgcaagaggtggtcaggaaatatctcatagatgaattaaagaagtgttacatgaaaatgtaaaggggcaaaccaaataaaatgggttcattaggtcccaggactagtggaggggcattcatgttggaatggagagtagtgagaattggggaggggttgcataggggcttgttcttagggcagagtttttcaacaacaggtatatataagaggtcaaaatttaggaagtctgttagagaagattataaactccatgaggacaggagacatgtctgcattgttcaacactggatacttgatataatgcctggaaaatagtagatgtgcagtataaatttccgttgaatgagtaaaaatgttaagtggcgaataaaggaatgcatggggatgatacagacaaagcagtaatctgtggtggttgatggctgacctggttgtagagtaccagggggaatgtgaatattttagatttcctcagaggctagtttctgagatgttttgtttaccagtgtggtaaccttctcatggccctagctcaaatggtaatcaactagtctttgcagcacaactgtgaggtaaacatgctgtgtccattttagagaagaggaaactgagattcagagagatgaaggaatttgcatgaaggtccacaactaagaagataagatgtgaaactagatatttcagctcttgaatacaatcttctttttacttgagcgctcaatgctggggacagttctgcttttcaagtggcctgataaatagtatctttgtatcatgtgagagttattaagactgtgatagaaataaataaggaaaaattcacataccagccaatcctcgttactctgcttattcccctattcatcatttggctgattgaatactgaagatgataaagctgaatcggtagagcaatgtgtgattaaaaaaaaatctgctattccacttaatgggctacagttattagaaagaaatagaaaccccagttaatgttagtatgggctacttatttaggaaaggagatttttaaatgaaataagcctttcctttttattatattgctggagacagttttcatttttgcccacctggtacttaaatggttattgctataaggaaaccagtcttactgataaccgaatgaaataaattaaacagacacatgcaaacaaatccaaaatgtgcctgagaaagatgtggtcttctagctttcagtcattcagtgagacatttggcagagatgggtgcagcagataaaactgtcatggttttcagaagtcattccaagacaccagagaggaaacatgacagacactggaaagagaccctctttcagatatgagtaatatatattttatactcatattaatatttcattggagagaaggtcaaaatctacatttaaatggaaatatttaaaaagcagaagcataatatttgactaagtgaaacactcagggtttttcaagaacacaagctgcacccctgggacctcagctctctagatctgttgtttcttagagcacggtagaatgtttgaattcctttagttttatcggtagatcttagccctggcatttaggaatcttaatccctctactccccttccatttgaccccgaattgtgttacatactacctaacagtgtgttcagtgcacagtatggcctctctcagtcctataaaattatttaaatttctaaaaattcatttttctggtcctgtgaaatggacataataggattgtggagatggacataaataagatgctttcaattatgagtaatggaaaacccatctaacaaagtatggtggcaagaagatgggaataggaggcccagggtttattcagaggctgtgttcatccttcgtttccctctgctattcaaagtgtgttagaattcaccttcaggcttctgacctcatgattataagatggctgccattgtttcagaataatttcttcatggcatctaaaacaagaagatgggatgccaggagcaaaagaatcttcctggtacctttttcctcctttttatcagagaagatgatttttcctcaaagcctacagaagacttgcctttatgtctcattgaccagacttgggtcacattaccactccgttatccctgccctcaaactggcaaagagaatcaagaagaccttgattggcgtagatcactcatgcttgatttcctgaggctcgtctcattgcctctctcagaaacttggggctctatttttattagctaagaagggcaatggttattgtctgccacagtgatgctcttgtgtgaagtaaaggtgcataaaatgcatgtcttccctggactttagtgcatccttggtttgtaagtgactacgattacatgaatcagaaataaatcaggaaaaggaaagttggtaattttggcctattcctgcagaaatcatagcagggaggggagtgtttgtgaacgaagggagggtccagttctctaaagctgtgctggtgaactaccactgcatagggtggccctctgctgaccctagagcaagctggaggtgagacgagtttgtcaggacatcccagattctttcttctgtactctttcctcttctctgttttccaccaatccaatcaaaggcagtgctgatgtagtcagcacaactcctgggatgcaggtgcctggggctgcaattctgttctgacactgactgtggacattctggttctgggcagccacttgaggtaacaataatgatacacagttcctgcttttaagaggttcatgatgaggagcttcactgctcccctgttgctttatgacaggatgaggattcagactaaatgaccacttccctcttttctcactctcaagttttatgatttctttcaagtttatttgggattttttttttttggtctgtgccttttgttaatatattctacatgcattttgcttctaggcatattgatattcacaaagtttaccactgacagttgtagtctgagagtgtacagaaaaaaacgtagttgaccactctatgattattctggactctgtgactctcttaatgcaagccaagaccacattagcctttttggcagtcttattactttgtggcttttgttgggtttgcagtcatccagaatttctaagaacaatatttggaaggtggctttgcagagacttgagccactgaacttctcttgtcatgtgcttcctttacttcactcctttctttaatatatgcctggcattgggcccagaatccataatacgatattcataataaataccaacatcttttgagcactccctatgtgtcgggtgttacactaagtgctttacaggtattgtttcatttaatccccacagcaactttcttcccctttttctggagacagagtctccctctgtcgcccaggctggagtgcagtggcacaatcttggctcactacaatctccacctcttgggttcaagtaattctcatgcctcagccttctgagtagctgggattacaggtgtgtgccaccatgtccagctaatttttgtgtttttagtagagacagggtttcaccatgttggccaggctggtctcaaactcctggcctcaagtgatccgcctgccttggcctccaaagtgctgggattacaggcatgagccaccacacccggcccccacatcagctttctaatctaggtgttaataattcccattttacagatgagaaaacaatatggagcaagctaagtcatttgagcaaagttatatagtagcaggtggttgaggcaggactagaatctaggcaatctagtagcacagcccaggctcttaaccttgaaatgcaccttaaggcattttataaatttgtcttactttccttaatttttcccctctcccctaccccccagtacatgcataattgctttaaatattattacttgtcctgtctttcaagctggcttaatagaacatacgacgtagagatcaaaagttacagagtactaaagccgtagaataagagtttctttattcattaattcatcctttaattcctgattgactcagttcctgaggtattacactgagcgtgtggatagagagaggaaaaagacctagcattctgcctttgaggagttcacaaagtcatatggtaaatggtgggcctgagattcttgtcccgcagcaaattctgtcattctttgtagatcatggggaaaactttgcattttgctctaagtgtgctgagttcagagtgtaacatctactttgctccgccatagcctttaaaacaggattcatctctgagcctcagcaccagtacatctctgggaatctacctggccttcttcattatgtcctgcttccctgacctacatttttttcctttttcagattgatttgttgttcaaaaggccggtgcccctggaatgaggacctacaagcttacttttatactagaaaataaaagactagaagaatcaagcctttgctcagatcatactttgtgaggtgggcaagagtagaaagccgaacacttgaacgtgagagcgaggagggagccacagatgaaggttgaggacagagaaagggaagctggagggctctaaacttgcagaggcctgacctggcacttcatctgtcgcctctgaaaacagctctgctcttgctcttgctctattctcatccaagtactaggcgatcctccttttatcacttcccagtttcttcctttagtttcctctaaggtcattcctcctttgcactggatttactttggagtaacagttgttggtgggaggttctgattctgcagagagagaaactgaggcatgggatagagaacagccatctgtactttgtcctgtaagtcattagagactggcagagccttgtcatagatcccgtggtttgctgtaagccacaggtggccctcataccctcataggaatagggaccttcttccttccttaacatgattggattttgtttttacctgaaaatacgagctacttctaacagaaggaaagacgattgcagcctgtactgcattgcccctatctgtaaccccattaagaggttgtaaatagtactataatgatatctcagtcatttgttttgatgtatccaggcttttaataaatcagccgcagcttgcttaataggaatatgagagcagagcacgttgctgccagcagctgctagtaaattataaagcattcatctgttttacaagggaattaaatgtttgttctctttaaagggttttgactaaacaagggtgtgtgcgtgtgtgtttgtgtgtgtgtgcacacacacagtggcttcctgcccatgccctcccaggtacagtagcaacctcaggttcctggggaacacctgtaaccaaagccatatgaattagagtgcccccaggtaaaccctgtcattattggtctctgctctgcgtgcatctctaaagcaatatttgttggattacatttgtcttccacgtcaaaggattctgtgaaatacaagtcccatttcccgctttctcctttttttcttaagactgtctagggaaggagctttagataaactatacatccagcacaacattcaattgtctgcacaattgagttagcctactttatttgacttttatgtttacatttgaagtggactccccccgccccccgccaccaccttttcgacacccttggttttattgactaaataatcttcagaagacaagacatcagagttggtgcttttggtggaaattaaaccacagcaggtgtttcaagaccagctttggcaacactgcaagaccctgattctacaaaaataaaaaaaattagccagttgtggtggcgtgcgcctgtagtcccagctactggggaagctgaggcaagagcatcccctgagttcaggagtttgaggctgcagtgagctatgatcatatgactgcaccccagcctgggtgaaagagcaagattgtccaaaacaaaacaacaagacgtggggtccagctaaccaatattcaagagctgttggctacttatcttgtgaccttcaacaagttatataggtttttaaaatctattactttattttttgttacttttaaatttggaaataattgcagatttataggaggttgccaaaataatatagagagatccagggtgaccttcacctagtacaatatatgtgtatagctctatgtcgttctttgacatgtgtacattatgtaaccatcactgcagtaaaagcacagaactgtttcatcatcacgaagatctccctattgcttcctttttataacaacttctaccaccttccctatcctcccctccactgtcttacctcctggcaagtactaatctgccttccatctttataaattttattcatttaaaaattatataaatgttattacacatttgtatttatataaaatataaaatatatcacataaatatgaaaatatgaaatatatacattaaatcatacagtacatggctttttgaggttgactttttaaactcactgtaatgctatccatcaaccttgttgcttgcttttatgaatgtttattctttattactacctagtagtattccatggtgtggacacatcagagtttgtttaatcattcgcttattgaggaacattttgattctttttacttttgggctattataaataaagctgctaggaacaattatttacaggtgttttgtgtggaagtaaattttcatttctgtgggataaacactcaggattgtaattgctgagttttatagtgtttggtttttaagaaatgtcagacttggctgggcgcggtggctcacacctgtaatcccagcactttgggaggccgaggcgggtggatcacctgaggtcaggagattgagaccagcctggccaacatggtgaaaccccatctctactaaaaatacaaaaataaattagccgggcgtagtggcatgcgcctgtagtcccagctactcgggaggctgaggaaggagaatagcttgaacccaggaggcagaggttgcagtgagctgagattgcaccagtgtactccagtgcaacagggtgacactctgtctcaaaaaaacaaaaacaaaaacaaaaacaaaaaaacccggaggttgcagtgagcccggatcatgctactgcactccagcctgggcaacagagcgaaactctgtctcaaaaaaaaaaaaaaaaaaaaaaaaaaaaaaaaaaaaagtcagacttttccagagtgactgtaccattgtacattcccagcagcagtgtatgagggaatcagcatccttgccaggatttggaattgttgctgttttttaatatggctgttctgataggtgtgtaatgatatctcattgtgattaatttggatttccctaatggttagtgatggcagacatttttatgtgcttatttgccatttgtatgtcctctttgatgaaatgtctgttcatgtcttttgcccattcttttggattatttgacttttactgttaagttttgaaatgttctttatgtattctagatatcagtatcttgtctgatgtatggtttgcaaatattttctcagtctggagcttggcttttcattattataacaggatgctttgcagagcaaaggtttttaattttggtgaggtcaaatttatcagcattttattttatggagtatgcttttgatgtcatgtctaagaaactcttcaccaaacccataggtcctgaagattggctcctatgtcttcatcagaagcttaagctttacattttacatttaaatgtatgacccattttaaattaagttttgtgtaagtatgaggtttaggttgaggcttatttattttttgcctatgaataatctaattgcttcaacactgtttaaaaggcatttcttctaacattgaattgcttttggatcgttgtcaaatatcagttggccatagttttgtgggactgtttctaggttctctattctgtccgttgatctgcgtgtctgtcccttcgccagtcccttactgtattgattacagtataactatttagtaagttttgaaatcatatagagtgattcctcttactgtattcttttttgttaatagtttcaggtattctagtttctttccatgtaaatttttagaacaatcttgaacgtatttacaaaaattttgcagggattttgataggaattatgatgaatacttttatttttatgttttgtagagacagtgtctcgccatgttgctcaggctggtcttaaacacctggacacaagcaatccccccaccttcgcctcccaaagtgccaggattacaggcgtaagccactgcgcctggcccatatgtgaaatctgcatatcaattttgggagatttgatatctttgctatactgaactttcccatccatgaacactatatgcctttccttttatttagatcatctttgatttctttccatcagcaatttgtagtttttagcatacaggtcctatacatcttttgttagatttgcatctaaatatttcatttttctgagacattatacataacattgtaattttgattttgcttttcctgtgttcattgttagtatattgaaatacaatttgtttttgcatgttggtcttcaactttgcagagttgacttctaggagtttttatttagattttttgggatttttgtaagcatatcatctatacgagcatgtcatctataaacagggacagttttattatttactttctgatataccttttccttttattgccttattatgctggttggagcttcagtactatgctgaatagtggtagtgagagtggacatgcttgtcttgttccaaatctgaagtgaacaagcattaggtctttccctactaaatttgatgttagttgtaggtttttgggtagttgttctttgaagctgaggaaattcctttctattcttggtttttataaatatgtattgaatgcttttttgcatcaactatgatggattatgttgattggtttttgaatattgaaccagctttgcatccctggaataaatcccatttggtcaggatgtataattctttttatatattgctaaattttgtttactaatattttgttaaggacttttgtgtttataagaggtagtatgtgattttttttttctttgctggtatttttagggtaatagtagcttcataaaaattggaaagtgtctgctttccctgttttcttttcttttttttcgagacagaatctcactctggagtgagattcagattcagattcctaggctggagtgcagcggctcaatctctgctcactgcaacctccgcctcctgggctcaagcgattctcctgcctcagcctcctgagtagctgggattacaggtgcctgccaccatgcccggctaatttttgtatttttagtagagacagggtttcaccatgttggccaggctggtcttgaactcctgacctcagatgatccatccatctcagcctcccaaagtgctgggattataggtgtgagccaccgtgcccggcccctgcttttctaatgttatcatttattgctaaaagtttaccgttagtactgcttgtgtcccctaaacttggtatgttgtaatttcattttcattcagttcaggtcattgtttaagttattttgaggcttcctgtttgacccatagattatttgccagtgtgttttttagttcccaagtttttttagattttcctgttatctttctgttatttatgtctgcttttctttcattgtggtcagagaatacactgtatatgatttcagttcttttaaatttgctaaggtttgtattatatcccaggatatggtctatgttatttgttctgaggtcatttaaaaaaaaatgtggcttatgctttgttaagtgtagtgtgctataaatgtcagttagatcctagcctgttgatggcattgttgaaatcttttacatttgctgattttctgtctagttgctctatcaattaattgttgataaaggggcattttagtctccaactaccttttgtctatttctcttttcagttctgtcagtgtttgcttcacactttacaactccatttttttgccacaaatacatttgggattactatatttgcttgattgattgacttacatatcatttttaatgtccctctctgtttctactaattttctatgttctgaagtctacttattttattcatgtaggtactcctgttttcttttgactgttttcattgtatatatttttcatatttttactttttacatatatttatcattatacttgaagtgagtttatggatagcatatagttcatgcttttttattcattcaaccaatctgtattttaattggtatatttagtcactgtacctttaatgaaattattggtgtgttagaagacccaggcagctcatcactttgaagttccttgcatcctaaggtccctagcagttctgcctgttctctctaccttcaagaatcttttaatgttcatgttatatatataacacccaggaattgttttactgtacttagcagaaatgataggaaaagtacatctgttccatctttctggaactgcttctttacttttaaaattaaaaaaaattattgatacacctataccacaatattgctgtaagtgagatgaaagtgaaaaaggattcaacatttaaattctatttggacatcagttattatatctaagtgatatatgaaatcatgttgctctagaacaatattaacagattttatgaggttcccttataggaatgaaaatttatacgtgtactctttctttctctttgacaccactctacccttttctccttctctaacatattccattaagaaattttactcaaacttatgctttgcagttggaataccctaataccgattataagtcctgaatcatttattaagtaccttgtaattgcccagcactgtgctaccaatgcctttcagtgactttctaaattcaccctgttaggtataattatcttactgtgtagctgaggaaacagaggcttagagaagtcaagtgatttgctaaggtcacttagctagggagtgttaaaactgggacttgaatacaggtcttagagtttaaagttcatgctcttaacctttatgttttacttcctccctgtattctcttgtacttcatcaacctgaattctttagagctttttgatctgttgggacctagtttgaattcttaagcattttattatttttatttgcttcaatgaaaggtaaaagatataacctagattttatccattgctagtttcttttagtgccatagtggttttatctgtcagcgtgtctgtgtgtttcttaatgttcctagcaaaatttaagatgtgatctagtaactgtattcttccaattgattcatctttagtgtcactttaattttatttttgaaaaattaacgttatcttctcatttctctgttggagtgtgattgagtgattaattcagcaattatttatagagcctactgtgtgataattattgtgcgagatgctggggatattcagtaattatgtgtttctttgttcttgtaattgttctgtgactttagttacatctttcttcagaatctttcaattcacaagtcatctgtaagatttcactcattttctatttctagagtgtagtccagaaaccatatgtgtttgtgggagtttggtttaattttggggaagatattgatacttctaaagttaggtacaccatggtctactgtttacttttcaatgcaaatagagactttattgatgaatgctttccttctcaagtacatgttttgagattggtgaaaatctacagaaaacaaataattttaccccttacgctgaatgctgggaaaagaaagggtcttgtctataaattaagagcattacctatgagcttcacaatgtacgtgatggacctagtctgtgtaaaatgaagattctagaagcagaagaaaatggcttcaaaagcaaatcagaggttatagttcatggacaagctaagtactaaaccaatcttattgttgtgaaattaacattttctgttttatctctgtggtatcacggaattttattattggacaggctaatagagatctgtttgagcagcctattcattttatagacaagaaacctgacacctgtagaggtaaaatgacttttaaggccttttgtgatttagcctccaaacttgaagacctgggcccttgttactgtatcctctggactgcattttagtaatattttatcatttcattatagtctcatacttacccaatattcttcctttacagggtttcagttttctcaactcaagagagtagataaggcacttaatgtagttcatttctagttggagtctgtaaaggtttatgaattgctttgttaatccacgtcactttgtatcttagctttctagactttaaatgttggttgtagtccgtataactgccagacttaacttataatgaatgccttcaggtaggtagatatttgtttgtgtgtgttccgtaaagaacaaacaaggggctaagaattatcaactcttgctgtgagggccccttagccaggcttccaccctctgcctcttcagtcttagggacttgtcaaccaacttctgcttcagggcctcagggatggtgggtggtggggaccttaggttggctaattttaccatggcatgacttccatttttaagagttattttcttggattgagacacagttagcttgcctgtggcttccccgcagtgattcttctgagtggatggaataaatcaagtttctctgtgtttcctgactaaatattgcaggttgtttgtgccattcctcactttttggattttagataattcactattctacatgcttcattttttttatgtttcctcaggtgagccccaacttttaactgagtactttagaaataggctgagtcccaaggggtcagtggaactttcttgttccacctagcataggcctgaaacagaggctcagtcttgggactccttccttcagcctggaaggaagaagtgagggagaaaggaagaaagtgatcaccaaggcaggcctggtgcctagaagctgagctttgagaagcatactttagtaacgcattttctgtgtcctctcctcagttaactcgtctcttgaatctttattattaaaaattaacacctgaactggtaatctcagttcctgcggtccctctctgtatttcaactttacatcagccactttttttagtattataaacaggagatcttttagacccctaggcttccagttttgattggccgtcaccttctagctccctcatctcattacagactaagctggatgcattaactagttgcatagtcttggacaagtcacttaagtattctcagccttagtttcctcagttgtgcagtgggtctcctcacacctactcacttaagaaataaatgaaataatgtgtgtgagagagttttctgaacaagaaaatattagctaaatatcatctttccttgttgtacccttgtttctacaggacacagttggatcagcggattcagtgcttttcctgggatctcttacaggttccctccatgcttgttgcccttgactgatggtatattggaacatttgtacacagtggccttgaactatagtgggcacttgaaatggcaacattttgtattcttctaggaactactgtttttctttgaaaagccaggaatttcacggctccagaggaggggatgcagaagctatttctttttattttcccctgttaaatcagtataatgagattctatgtgcatagtaatccttaagctctttgcctagttccttttgccctaggcaccttggagtgatggaattgtagtcagtcagacatgtgcagtgtattcacacatacacttagagggctcctcgtctgctccccctagctaagcagcccctttgaaatgtctaataaaatccctgctcttgtgcgctgcattgaaacaaagcaggctcacgcagtcctggaaatgagccctgagaggtattatttctatatgtcggtctttatttgcctgttttgacagtgtcgtacaatgagggtcctgctgctgatgcagcagaatcacaaggagccgtctttgctgtgtaaattctccctcaaaggtctggcattcgacctgcctgctaaaccctctttgaaacaatgcaatgacaaaatattttcttcttactgataataggcagattataattgctataattgcttctacctcattctctgaagggaggaaagtagggctatggaatgagtgcttaaaatttttatttatcgtcttagagatatagatggttcatttattatacagaagtttacatagcagcctctaagtgtacgttgtttctcaatagttggaattaaattcgtacttttggactactgtttattaagacattcccgggaggctgaggcaggagaatggtgtgaacctgggaggcggaggttgcagtgagctgggtttgtgccactgcactccagactgggtgacagagtgagactccgtctcaaaaaaaaaaaaaagacattcctccttggtgatgaataacacctgtgtgccaaaaggatttttctcattggctctgattaaggggatatccagccaataaccgtagcaagccttagggtgaatttttggcaatctccaggtctagtcattgccttatgggcagtctgatggcaccttgggcattgtcttattgccctgagcacaggtgttaggggcatggagtctgatgagccgtgctctgctgtctacccccagtctgttctccagaccccctaaccaaacttctcatagaggtgaccatcacaaggacctggtgtgtggctagatcagtgacaatttatgaccacttctggggaaatagctcagagtgcacgtccttcgtgtggtaggtccaaaatattatctttgtatgttcaaagtagcataagctttagttgctgctgttggtttcaggagaatcacctggatgtcagtgccttggggttattaataatggtaaaaaaccagtatgagggtggagcttagaagtagaccaagacttgtgagtcatgcactgctttttaatttgcaagctaaataggtgctaaaactcacctaccctggctgctgagatagtcactttctcctggtcctcctctattgtaaagagaagaggttggacttaatgcccttcaaggtcttttctctctgactttctgtgaaactccaaggtgagtcctaaattttgttttggtctataaatttaaatgcttcccctgctgagctgctttgggctgagaatagaatggatggaatttacaccttctctctctctctgtcccatgtgatgctttgattggctgctaacagaagggaaggtggtcagaaggcaaggaagccttggcaaagaggaagaggagtgaaagtactaaagaataggaacaactgggggtcagccctggaataaaaaagacttcacagggcagttactaggcttgcctcactctttggaatcatgagaggtttgctaggtatgtactgtaaggcccgtgtggccagagactgagtcttggatttactctttttgccctgacattgccttgtgtagcactggatatcatgtaggtactaattatttcttctttacttaacttcctggaaaccgctgcaattgtcaagtgaatagaagtgaataggactgttatattaaacattatagagaagggtccatgctcacagcatcttcatcattccaaatattgtgcttgttgaagcagagaaccttgtcaggacagtcattgtaccaacatttacgaaatgaaagcaagagctattaaccactgtataagatttgaggatattgtgctttcaaaggaagcaaagagggtttaaaattactccagtgggatatctctttagcctcacttaaggattgtttaaaaggaaatagaaataaagattgtttcaaaagaaaaagaaataaagttagaggtgaatagatggtatatgtaagagctttatgttttggtcatactaagtttattgttaagttacaacaaaaaaattgttaactatcatgtctccagttttgcaggataattttcttttaatgtattccaaaaactgacctcagaatttgatgaagtgttagacaagatgacaaacagagagactgttagtaacgggcagaagtcattagtctcagactcatattcatttgtttgtggttattgattctagtcactcctattcttatctccatccaaaaataggcattaaaccctaatctcttgtggatgtttgctttgtagatttaggagaataagaacatgtgaccatacctggttagccatctcaagatttgttatgagctagttgacttcaagagccagtgagctgggttgtgcaggatacttgttactggataattctacttcagatagatgctctagttgctctgctaaaatcctctgttctgtcaagcctgtcagagccagagtgaaaaaacaaaacaaacaaaaacaacaacaacaaaaccctagtagagtacctgaactctaaattacagagtttaaggactgaaaatgaccttgaggatccagagtaggactctcaaactcacatgttcctggggtagacaggtagcagagtgaatgaattggacaactataagcaatgggggagactgaagagacattcaaatttagaaaattttaaggacattatacctgcctgacaaagaggtgtttttttttgttgttgttgttttttgttttattttctgtctctgatgcttgaatcaggaggacaaagagctctgatgctgattcagctgcaattttgaggacccttgaccctaactatcaggttatctatttctggtttaaggatgatgacctgagttacaggtaggaaaaggcatttaaccaaggagagacagctagtgagggctggagcctggggctctgaggtgtagtctgaggttctttctctacaccatggtgatatctgaaggggaaggcaggaacacctggatttcaatcagggatttaaaaaaaactttctatttttttagagaggtataattaacatacaatcaaatgtactcatcttaagggataacttgatatattcttatgtgtgtgtcctttcatgtcaccaccacccagatcatcccaagattctccttgtgctcttttccaacatcccccacacccctgcaccggaatcacaatttaccagggaaccatggcacttttccttccacttgcagagctggtccgtctgtcactggcccagttcctcccctcacctccctctcctcagattcaattgtaaagagctatagcaaacacaagggcacatgttgcttaatttttttttcccacataacccaacagaatcttgggtttctttaaagtaagctctctaattatgccaatgccattgactcaccaagtaggatgccaggtcccacagggtgtgtccttcacagggttctgagggtactgcttcttgcaatgtcaactgctttatacaaaagcatatttaaggtcacatgatatttgccaagttattaattattcggaggctacttttcctctgaaagaacttcagatgtccgatgtcatgattttattaaatcaaagacccatatttcattgtaatggacatggcactcaaaacctgggaatcgactcattgaaaatgtagccaacacaacactgaaaacaaagcccacctcacaggcaatgcagcttccttaaaaaaaatagctgattcccaggctgaagctgttaagcagatttttatgcagggcttcaagttactaaaaaagcaggattcaatatgcctttctctttgatttgtaggagggggtgggaagtaatgctgctgctctccccttacccccttcagaagggcttttaccatattctgaaagcaatgcttgaaggacccataaatggattttggctgtctcctagtgcagggattaacatagaattatagaagtgtgctgcatggtggttgggaaaatagggaggatgccattctctttttggagggacatggtgctcccgtctcttgcctgtggatgttccctataaagcagcctgtcactgtgaaaaatgcacacactgtaccatctcacagttataaaggttaagtaagcatcttgagcagtgccccactgcttttgtactttccataatgtcagccgataaaggattattgaaaaaggcttgcaaggagataaaaggcttgcaggttgaggttaaacaattgaaattttctgttcccagtgtagtaaattaccaatggcagatttaacgtttgttaattattagagcaaagtactaaggattgttttcttttgcctaattaattacctcatctggagtggaatgttaattcagataaatgattatttcttaatacctctgaagctttccttggaatctcctagaattgccagtcctgaagtgtggtttcctcacattctggggaagataggggataggtgaccaacgtgactactctcttggcctttttcccgtctcagaagatggcaggataacttgtttagacttttggtgatggagttggtttgctgttctagttagtagaacatgagtgtgcttcctggaatcctgtgcctcataaccaagtttttgagttagtctctcgtgtggttttgaatttaacattgaacattctttttacctttggtaattctcaatttggggcacctgccgtgaacattaaagatggtatcctttggaaaggacactctagtttcttaacttgctttttacctttaagttattttacctcctgatgtctgttcagaatgctagaggcaggtttttattctttcttggatctaaactatatcacctctaatagttgtgaatagataatattcaaaaaaggtaaaatcatgactcatgcagatataaaatatccacatgtcaaaaattttacttattttaaatgagggaaccagatagatgttacaacaggtaccaaggagaaatgaaagaaccacaaatttatatggaataaaggaaatgaaaacgaacccacaaatgaacacaaaacttttgggggagggttgttcctctaggggacagaatgtatttgcatagctatagacacttttcagagttgtaaaatcgcccagtcagacacaaaggtaagtgtccctgtaggatgagaccattttctgaaaggagggccattaatctcttttgcttttttttagggtcagaaacttccccttagacagttgtgtatgaggttttaatccagttacttaggatgacattgtatcttcaaagtagattagagatgaattatgtgacttatttttctttttagaaggaagcttaaaggtgacttggggagatgggctggtagatctgggccattggaggcgagctacaacccatgtgaccagttaccctgcacagtctctactcctgataaggcacttattttatgagcacttttcataatgatatgaaaaggcagcgggattctgtctaagattatctggagtgaaagctggaggctgatattaaatggatagtcctgttttcttttggtgctgccaagctgagctgtttaaaatgatgcttggaaaaatgcctcctgagccaggaagttgtctgattagtgaagagatttccgagacgtttggctcagagactaccccatcataccacacatgttcttttccacattcacctgagtcttccaaagatacgaggactcggggtggtgatagggtgtacattcttacatacacatatgtgtatatttgtatatacagtctgtctatccatgggttctgtattagttgattcagctaaccatgcatggaaagtatttgaagaagaaaaaaaggatgtttgattctgtactgaacatgtacagacttttgtccttctcattattccctaaacaatatagtataacaaccatttacataccatttaaattatattaggtattatgtaagtaatgtacagatgatttaaaacatatgggaggatgtgagtaggttatatgcaaattttacaaagggacttgagcattcgtggattttaggatcttgggggatgctggaaccaatcccccacagatacagcgggacaactgtattcatataaatatataggccagagattggctttaggggagtctgcaaagttccataattatatgcatttttcttaggcagtattgtgtctgtcagattctcatagtctccaaaagttttatgattcttcaaaagtttaagaactgcttacagaaaccatgcccccagtaattattctgaatctatgtgttaccacgtgtatgacttagaagaagtctagatgaaggttccacctaattacagaatccactgctgtagccacagctggattgagttatgtggcagccctgccccagagctggggaggctgcgtgtgtgcccctccacacctgagtacatcctgggtgtgctgaaatgaagcccagggagatacaaagcaccataatgccattaaggccagcacccgttgggtaggggagaggctgaccatacagacttctgacttctgcgtttcattccctgctctgaaacctgtccgtctctcaggcttgcaatctgccttcctgtctctctgacagacctgtgacttgggctatggttctgataccaggaaataatgcaggggtgggagtcttagtcccaagcaaaataaatcactgctcccattagacattacaatgtttaaacccaagtacatctgtctgccttcaaaaccaagatttagagcatgtcaagcaggtgccatgcctccaataacacatactttgttccaacatttagtagattactgtgagattttaaattcaaattctcagacattcactttgtttaggaaataactgcaataaagcaaattgtctcctgttctttttttccccctacggtgcagccaagtgagagcaaatcaattcctagtcaattttttgttgctgttttcctccatgctagagaagagatgatgcagctctctcctgttgcagccctgtgctgggtgtggttccctctccttaatttgtcatctgaaagcaattttgttcaattagagattagaattaaatttcagttgtagggcttctgtgcagaggaaatgatgcattaatgaacacacagatgtcatcttgcagccatgatgcttgcagaacagtttcttcaggattcaaataataaaaggggccacagcagcaggagcattgtttactggttggcatactaagtggaggctcacatttatttgcaaaccatttatcattctgtatactgagagggagaacatactttatttaaaatatttgaaataatgactcttaaaatcggataacagaagcattaatgccaggtgccatgcagtaaattgcataatgctgttgggttggcactgacactgtgatttgtgttgctaatgatctatccaaatagatgggagttgagaataaaaagagaatattcctggaaagagacaaggcaactagtgaattaaaagtgtagtgagaaagggaaaaaatgtgtaggatcgtattttacttattggaagacccatctgctcttctgtacacacattatgtaagtttcactctctgtattacaaataacctgcagggtggataggaagttcatatatctgccttcagctgtttttttcactcacagacgtgaatgaacagaaagatttatgtcttgtgtgttggatattataggatggtaggttttttttttttttttaagggcgttgtgtatttagactgtgatattctgtgcactgctttgcttgaagtgagtgatggctgcgactaagaaggcagcaagtggggagtgggagtttggggaggtggaaaagggtttctgtgagacaatattggtttgtctggtctttgggcctgggctacacacatgccctttgacacttatggttaaagtgtttatttccgaatggtgcccagagctatgttcagtgtgtcctgagtcactgttgaatttttaaaatttggtagtctctgtgctgtccagaatttcttagatgtgttttgaatacagagggctctcagtatcaggtggcatccacgctggtcattgatgttgacagggatgaaatctcacttaaaaccctctaatttcctagttcaaggactcttccttattcctcttcccctgttgcaaaaggaccctctgatgttggttaagggttaatagttctgtccttgaaatgttttctttctgcgacatcacatttttcttttgctttatccatatcttgtgccaaggccattctctttcattctcatttcctttttaacccctgtgtgtactgcatcaagtcctattttgctgtctcttcgaatttagagacatcatcagtgcatatcatccattatacaaaaaagccagtaatagcccaatttttatttcctgtccaaatttttctcctcaacttcatatccatatctctcttccagaaattttattagaagcacaatgtatctaggataaaatgtaccctctccctaactcttccttaccttttataatggtgcttacgttttccatgtcttcctacttaaaattgtattcatgtttgtagtcttctccctgacttcactgctcatgagttctacctttttcttgtctgttataagtcctttccttttcatttcttttgctacctgccttgtccagatcttccttacacatcacctgcaagtagctgatcatcctcttaactgatctggtagttaatggtgtcttttgctcccaagcctgcctagtcctctgctcatctacttatttctgcctactactccaaagccttcattggctccccattgcccaaaaatgaattccaaacctcccagtcctggtgattaagtagttccctcccatacccaaacaacccagccctgtcttttactaacttttccttataggtgtgtgttttgttctccctgttctcccctgtatgcctttcaaaaccctgtccttgctaaagcccagcttggatgccttttcttggaaaccttccatgattgcccccctggagtgtactttgttgctctaggtataaatgactactgcacttatgttaaggcacctgtcacatactgtaggtatttaaggacctcctctctctgctggatgatcatcattttgatagcatattccttttgttttcaacagagctttttctattaattttaaatgcaatatactgttgcaagtagtagttggaaaaaatcacagagcaagcaaagttctggaatacaatttttaggtcttcctcaacattcctgtcacagtagatgatgtacacttacagcagaagacgatggttagaaaggtaagagcctagggtctgagtcagcttcaactagaatgtgagaactgagatagaaggaattatttccaccttcccggggattttctagcatagcctatgggttgtggtttgcccagcaacaccttaatctagttgcttatgtttagtaagcatttacagcctgggttagccggctggggttcaagactcttggcctttaggccagtgcttgatgcttctgtcagcctggaaaaaggacccatgtatcactcagtggttctttagccaacttgagcaagtaaagaagtctaggaggcagaggtcttctgccagcttcagcctttaggattgttagggtgatgtggggcctgctctggtgtgtctcgtaaagaggatgaaggagcagtgagaattgtgtagactagcagtatcctttcatctgctttgttgtgagccagcttaggtggtcttttctctgctattaaaggggaattctgactccttgagttgatgagatggagtttgggaggcagataggccttgaggacttggtgggagtttgtaatctgggcggcctggctgaattcatcacaagggtggatttttaaattgccttttttgctcacctactcaaattgagtcactgagcagtatacttgtagatgctttaacaagtagattatattgaatcacatttaataggaagatgactaacacaagggagttgttttatgttttaaaaactgctcacgttcctgaactgcagaagcacctgttctgttactttttaaaatatggtcgtgaatatttttccctttttggtttccccagggcagtgatgttctggttctgaggtctagtacagcatttcctttttggccttttgtccttgcttaaattctcttccaattcttcccttccaatccactgacccaggattagagtactaaaacctcacttgtttttccttatttttgttcatctaacttaagagtgcgtggcaaaaatcttcctttgtttttaactaagctcgttaccttcaccctggtttcataatgtgtcaccctccctctctccccctattttttcctcctaaattaaaccaacaggagtcatttgaaataggcgcagtgccagaattagcaaataaaaatacaggacacatagataaatttgaatctagataaacaaataattattttttagtataagtatgtctcatgcaatatttgagaatacttactctaaaaaatcatataggaaattcagatttagctgggcatcctgtattttatctagtaaccctacataggcatatatttgaaataaaaataaaattttacattaaagaaaacattataaagaagaaaaatttaagtttattgtgtgttaaatattcccaatgctttccttactgaaaaatgtaagactgtggacaaattatgaaacagtttgtgcataagatttataagttagctacctaatgaaaagcttctgttggctattggaatcagccatttatcctaggattcagctttatctctttgctaagaagatgctcctgattttgaggtgagaatatttagtgcaagcggtagaccattgttacatatgatatatcacaagcacctgtgtcaaaaacaaatgttgaagtattcaacaattttttcctcatttaaattgtgcccagctctcttagctcaatttcttctggcataaagattcttaacacaaacaattggatgatgaagacagtaaattcttgattgagcgaagtttttatccaagactagcttccctctgtcacccaggttatatgtggagtacaaactaattatgaagctaaatcttcctcagaccacataagtaagtctactccaaagcttaataaaatgattctgcaatatttgttccatgctttgctttttaccaagcctgtgcatacgttctgatttgattctcctgacagtctatgagagaacagtgatgatttgtctcctcattttataagagataaatttgaaattttgataggtgaaatggcttgcttaagatcaagcaagacttaaatcttgatcttaggccttttgggccattgctctttccactacctgtattgacttttgaatgtaagtgatttgggaattaggcagtttaggagtaattgtaccagtgttcccctctgctagcttggaagatgaagagctgttttcatacctgtgcattgtgctggaagaggtatttgcctttggttcagtgcatacctataatacacattgggtcttcttttgaggaacagctgcctcccctgtacaaacagcctttctgaatgaaggggatcagccaccgttgacctgtgagtttgaagtattgcactgttaatgtttgggcaggatttttttgaacatgtggttgtaccacagagttacgcaagcgaaatattcttggaaatgacattctgcacaaccgtagggagaaatattgggaagctggcaagagagtcaattctatcagtgtttattgagcacctataatgtgcattttgtgaatactggatgatgtggatgagaaaagatgtaagtcctactcaggagcccttcctgccacagtaccttcattagcatctcctgcctatcagtgcttgaaattcctggctcatttttgatatattttatttctgatttgaggcatcgtgtcctttattttgataaaatattatctaaatattttatatcacataaattattaaaataaaatattattttttgtttgttatgtatagtcccctaacaaagtttgaactttttgaggtcaaggatcatatatatatatatatacacacacacactcatgtacagaagaagttcttgaaaaatattggataagcaaataaatttgtggtattcttggggaatcttggattaataaatggatagcatccctcggttgttgtatacctatattcaaaggatccatgactcaatgatggggtaaggaggctaaaagaggcaaagtcaatgactgaattgaacatggcatatcatctcaaattatactgggaaacaacattattgtctacttgttaaccaaatatatgcagttgatatcattcaggccttgcacaagttccttagtgtataatcttggtccttagaatgaagtgagcagcaggtacatattcagagactcatagtttgatggcatgggaactgtatctttggagatataatagaaaaaactgtgccttatctgattaaaaatgatttcctaaaaagtacttggataattcctaattgtcccagttttcataaatgatttggaaaatgctgtttgagactgtgattgttaatatactgtggaagcctattaacttctttttagaattcaaaagcctttaatatatggggcaagagaacatggattgacaaatggataagagtaactaactttattgtaaatcactgttgatatttggtccctgcctttgttcttttgttttactttctttcctcataggactcattaccttttaacatattagtaagaccgggggaatttgttcacttttttccttgatgtataacaaatcatattgcttaagttaaagctaaagtagatatttaggttaaaaattatgtagatatttaagttaaaaatgtgaattgacttaaggaataatattaagagaacaatgtagcaaaaattgtcatatatatacatatctgtgcgtatgtgtgtgtaatatatatatatatatatgtattcacgttatatacagacatacacacagacatatgtaagtaccagggatgaaacaaaaaaaaaaaataaaacaacatgtgttaagtactgtgttagtactaaagatgacagaaaaaagtacaaccctagatccttggccagagatgcttacttgtcttacacttcttacagtcccctctttactacacgacaggttaacttaatcaggacagactgtataagttacagggcccagtgcagaatgaaagcatggagcctgttgtatagaaagtaggacaaaggtgccattaaaggtggtaaaatataaaatatttttcttctaggggatctctctcaactttttatggtgttttaaattagctgtttaatgttgctttaagtgaggaaaaattcaaattttaaattgctagcatgaattttaccattcatggttctgttgtgcaatgccagttttaaatgcagatatgagagcattcaacttgtatgtagaatcactgaatttatacagtttatgttatgcctcataggcacataatgtattttgtttttaccgcacagtggaaacactgcatgaaatgaactcagaggtttttatttcacttgttgatatgcacacatttaaccaacactctctaccttcagattacaatgagtaaggaaggactgaaagggactgtctttccctttcctcctgtgtcattttcagtgtgattggctaatacagggaagtaatatgtgtaagaaaaggtatgttaggatttcttgccattcatgtttgttttagaacactatttccagctttctgcctttaaattgaagttttgatttgaagggaaagtataggctcccaaggttgtctgtctttcctctggcttcgtcgtaaccataacacacttatagggtagtcccccctttatccatggggaatacattccaagacccctagtggatgccggaaaccacagatagtactggcccctgtatatactatgctttttcctatacgtacgtggctgtgataagtttaattagggacagtaagagagctaacaacaataacagagatttaacaacaataactaaaacaacagttattaaccacagtactaaaagctatgtgaatgtggtctctctctcaaaatatcttactgtactctactcaccctttttgtgatctgttgatctgataactgatctgagacggctactaagtgactaatggatgagtagcatctatagcgtggacatgctggacaaagggatgattcatgtttgggtgagacagagcaggacagcacagggcctcatgctattcataatgcctcaaaatttaaaactatgagttgcttatttctggaatttttcatttaatattttcagattgtagttgactatgggtgactgaaattgtgaaactggagataagggggactgctgtactctgatttttactgaactgtcacatattgcaggctcactggagttctatgttactgggacatacaaacactatgtgaatggggcagccaggaattcgctcgcgcctgttgcgtgtattttttctactcatggacatgttccactgtgttatccgacttaacttacaaaacaaagttcaaagataagattatagagcattaaaccaagtgccgagcccttctgagtgcagggccctgagcgattgcacaggtcacacacccatgaagctggctctgaccttaatagataaggaagcacagcagagacataagctgggcctgatgccctgtgttttcacactgaggaaagcatgaattatctcttacgttccttgtttgaaactcaggcttcaaaagtaggaaaggttagaacatcaatccattgtgcctttccaccttttatctgtaacttgctgaaatgttttcttcctcctcctccttttcttgtcatgttggatatgtccttaatatatcagtgtcaagtgttgtgtctgaatgtgaacctgaattctattctaagtgctgaaattaaaacagtgtttctctgtttagtttctaatgtattcggggtactagagtatctaaaacagcattttaagaggctttaacattttttgcctttttttctcccgaattatacaagtcatttttctttttctgatttgttgtctcctgagaaagtaggcctccctttttttttcttgcatgtggcagattagtatcctgtggtccattgcaaccactacagtggttggtaggaagtagaacttgtagaaggtgcagttaaaactactattaaagtagcagggaaccttctttgccctctcagatgaggaccaggaagttgactttcacatttgaggtggcacttgatgtagcctatattcttttttttttttttttttttttttttgagacagagtctcactttgtcaccctggctggagtgcagtggtgtgatcttagctcactgcaaccttagcctgccaggttcaagcgattctcctgcctcagcctcccgagtagctgggattacaggcacgcaccatcacacccagataatttttgtatttttagtagagacagggttttaccatgttggccaggctggtctcgaactcctgacctcagctgatccgcccgcctcagcctcccagagatatagtctatattctaaagagactctcttctaatcaagtggttatcatctgctaatactttgaggaaaaaagattaatgttccaggatttataagttcagagaactagcttaacagagtgcagtgcttcacagatctgtctggctgtggaatcagattgactttaggttgctgtggtagctctgcagcataggagctgggaaatttagtaaccttacttggtggttctcagcccttattggtatggttaaggaactttgaataaacacctgtagagatttgaatttagttgccgttgggtggggctcaggctttttttttttttttttgcatcccagagttagcagtcagggttgagaacactagcttatctcagaacatcaatattctcatttataagatgagagaattagactgtatgagatcgtcgtgagatctaggcagatgaacacagcacttggccagtcaatgtgagtgactgttatcgttaaccacccttactgattctttgctgagattggaagctagattggcattcatttcttaagctggaaacctgtgctgatttgttagaaatgctgcaaggaacagaaatgattatctatcctaagggaatgactcagatcttgttagaataccatgcccaacttctcacctcccagaagagtgtgtcacagaatagctggaattacacctactttatgtatgaagattatccctggaatagatacatctttgaggaagaagttgatttattcatttgtgtaatgtttattgatacttaatacctatcagcacttctagactgtggcctggaggaatccatagattggtaattggttggaaaagtgaatgtaaattataacacagaagaacaagtgttttgttaaggataatggaaactttaaagctaagtagaagatagccaagctgagaggcctgggtgggctagggaagaaggttattactggcagaggaagttgcagttttaaagagacttagaggctggacacagtgggctcatgcctgtaatctcagcaatttgggagaccagggcaggaggatcacatgagcccaggagtttaagagcagccttggcaacatagtgagaccgtgtgtcaaaaaaaaagaacaagagacgtgaagacacacttggcatgactgggaaacttaaagtagtttagcatgtctggagtatacttactccagaggtgggagtccagaagatggtgataagaaagaggttagaaccataagcagggtcccagtcatggaaggctttatttggagattgaaattgattattggatagccattgaacattgtaagcaaggaagtggcatgcttaaacttgcactttggagatgtcacaatcctacaacaggctgaaaggctggagacatggaggccacttgggatgttgttaatggaagtccagatgaggaggtctgaattaaggtagtagcagtgtagtcacagtgaggtggacaacagatggcggagattaagaaggtggaatttgtaggtgtcagccccaggcattgcatctattttttttttccaagttgtggagacggagtttatctctgtcacccaggctggagtgcagtgacgcgatctcggcttactgcaacctttgcctccctggttcaagagattctcatgcctcagcctcccaagtacctgggatcataggcatgcaccaccatgcccagctatttttgtttgtttgttttgtatttttagtacagacggggtttcaccatgtcggccaggctggtcgcgaactcttgacctcaggtgtgagccattacgtccagttgcattgcatctgtttgatgttgggtatctaggatgtacatctgtcaactcgtgatgcctccctgaaccttcgatgattatctattgactataatctacccccaaccctttttttttttccattttcatctttcactgaattcctctgtggatccattgatcacgctttgcatatttattccttctcccccaaccccattcttcctggatgagctttttgctctcttttaaaccattgcacttgactgtctaggcatttgccagtatatcaaataagtatgtatttgaaagtctaggtgagcctttcttaaatactggatgctcagtctaaggtatccattgtgtttatggaattactttctctcctgtgtatctaaatggtactagtttgatacttttctgaagataattgagaaaaagtaactttgatctttttttcttctgtggttcagaagagaaattatttgtttcttgctcctatctgagccagattgcaaatttagtgctaagatttctggcattaagaggattattattattattgttaaattgattgtctcattagattaccaacatgaggctcatgggacttaaaagatttatgcccatatcctggttccatttttgtgtagagcctgtgggatgaaaatggctcacaggtctgtttgtgacacaagtagcttgatagatggcctatggttcatgtgtagaaaatgttggcgactatagatttattttagtatcattttaggaagcacaaaagtggtgtcccaattgaaccttatggagagagcatcattactttccatcacaggttcagactttgggaccccagggctctggaaatggaactctttgaagaggtcagagcctctatgcaccctctcagtcaactcaactgcatgtagaggagggaaagaatgttgttattattcttaatattcttatagtagcgtctaatagtacattagtaaatagttattcacaaatggttgttcctattgcttagcaatttctgatttcagatttgtgttttggatatatgtgcatactgaccttctgccttttaataaatctagaattcatttgatagtacaaattaacaaaaccagttgtaataaaaatattgaattttaactttaaaaaatatgcagtgtggccaggtgtggtggctcatatctgtaatcccagcactttgggaggccgaggtgggcagttcacgcggtcaggagatcgagaccatcctaacgaacacggtgaaaccccgtctctactaaaaatacaaaaaaattagctgggtgtggtggcgtgcgcctgtacctcgggaggcagaggttgcagtgagctgagactgtgccgctgcactccagcctgggtgatggagcgagactctgtctcaaaaaaaaaaaaaaaaaaaaaaaaatatatatatatatatatatatatatatatatatgtatatataatatgtattatatatacataatgtattttatatttatatatattttgagatatatataaaatacattatatatatacataaaatattttgtgtatatatatatatatatatatatatatatatatatatatatatatatatatatatatatattttcagtgttcatataacaaatttcttttgagagctaccaaggaccagacttggtgctgtgggatatttgataggtgtgagacagtcttttcctcagagggtttgtatcctaggagtagggataatgataactgcataagccacctgattgatctggaattggatgcaacttttactacaggaattgacataaggatttagacccttttccagtacattgacctagtagtattaacaggactgtggcaactttgaacttccctaatgagaaaaacatgtgttggtgagcaggtattatcacatcttcccttgcttttctgtttaaatacagtatcctattcagataggcaaatctctgatgttttgttgagtgaagtctatgggccagatcacataatagatgatgtgtttgttggttgcccactgattagcttgggacttgttacctagaggtccatggcccttctgaagtcttcattatgttgttagtttcccaaaatgatccgctgacacttgttctaaatatggtttattttttgcagcttaatgatttacttatttgccaaatactgggatttggtttcagagagcatccttttctacctccttgggtatataggccttgatttataatgtctagttactctgtcaatgaatcagttagtgaccattttgagtgttaagagctttgagtaaagaagtgtgtgaaaagccttctgccaccaggaagcttgcttccctgtgcctagtctaaaccaaaagtcttcaaacttttttgattgtgaaccccagttggacaaatcacttagagtaagcacctcattttaaagttttatatttatactactgtactaatatatagatcagaaacataccgaattagaaagtaataaagaatgagatgcatatttatttatttacttaaacttttattttagattcaagggatacacatgcaggggtgttacctgagtatactgggtgatgctgaggcttggggtatgaatgaccccgtcacccaggtactaagcatagtacctggcagtttttcaactcttgcctcctccctcccacttctgatagtccccagtgtcttttgttgccgtctttatttctatgagtacctagtgtttagttcccacttacgggtgagaacatgcagtatttggttttcctgttactgtggtaattcgcttaggagaaaaacacatttaaatagacattataatgcagtcttacccctcagtggaacatcctacagaccactggtgtagacagaaagtgctagaggggtgcttgggagagagaaatcatccctgaggcacgtagtgaagaatgagttgtgtgcaggacatcaccagagtcatggcaggccgtggagaagatatagttggtaccatcttttggtgtaagcagcagggagccatggatcttcctaggaggagccacaaggtagaagtggccatgccatagatgcctgcatagcatagtgggctggggtagacggtggggggcatgtgtgtaaagagagaatgtgagggagacaggttggtatcctaatcctaatcccacagcagaatagaaaggcaaagaggatggtggtggcaggtagggtgaggaggtagtgaatatgtggacatttcctgcatgaccagaactgctaaggaggaagtgagtcttgaagtctgctggacaaacaatggtttgtagtaggagaaccctaaggtggagggagcggggaggggaaggactggccacatcccaaaaccttattatgtccaattttactgcagctgttttatgactgcaacatttttgttcaggaaatcgtttatttacccccacaccttttcttttagactaaatgacaagaaccagtgctcacatccagggtcaaagctaatctttgaggaggtggaaaacgcctccttgtttcattgtctctcttgaaagtggtgtctccctttcactctcctgcaggagagagatgtccaggtactgcctaagcagccccagtgaaaacggatggttcttgaggcttccagaggtcaatctggcataagaagtaaagaagaagccacatgactcggagaggcagaatttctttccttggacaggatagagcttttaattgaatccaaatcacatctctcatcctgtgaatgctggagagcagtacatttttaactaggaagagcatcaattatgtattagccacgatactaatttaccctgagtgtgtgtcttagagctggctttcatctctgcatagccactgatgtaatgccattgtgtttctatactcaaccagtcgctcttaagatagggtgtcctgctattgaaaagagtagaaagtagggattgctattgctgaggctctttctgtgttcttacagctgagggccctttgggataccaccttagggtgggagagctgttcactcaccgttgtgctttgagatgcagactggggcttgtccttttactctgatgctgctgctttatcagttatttggtattattgtgttccaggataaatctctggaaccctcagttatagatatttgagactttctgtgtgtgtgtgtgtgtgtgtgtgtgtgtgtgtgtgtttgagacagggtcttgctctgtcgcccaggctggagtgcggtggcacgatctcagctcactgcagcttccctccatcctgggctcaagtcatcctcccacttcatcatcccaagtagctgggactacaggcatgtgccaccatgcccggctattttttttttcttttttttttgtagagacgggattttgccatgttgcccaggctgatcctgacctcctgggctcaagtcatccactcacctcagcctcccaaagtggtgggattgcaggcgcgagccactgtgcccagcctgagattttgaacatttgcctccagaaaatgtaggcagtttctgtggctgcttatttcctcgccagtaatatattttgcttgttcctagagtactaaatgtaatgatgaccaaagtggactgagcatttcctagatcttgacactcttctaagcacattatatatattaacttattaaattctcacaaaaatcctatgaggtaaatactattatcatccctatgttacagatgaggaaaatgttaaataacttacctagtgagtgtagcataggctctggtgtaaaaagctgattcaaacacctgccttgccactgtgaatcacggccctcagtcctttcctgtgaaaaattgatttttattttttttgagacaaggtcttaccctgtcactcaggctggagtgcagtggtgtgatcataggttgctgcagccttgacttcccaggcttagacaattctaccatgtcagcatcctgagtaccttttaattttttagagagatgggatttccctatgttgcccagtgtattagtccattcttgcactgctacaaagaactaactgagactgggtaacttataaagaaaagaggtttaattgtctcatggttctgcaggctgtacaagaagcatggttggggaggcttcaggaaatcttcattcatggtggaaggtgaaggggaagcaggcacatcttacgtggcctgggcaggaggaagaaagtgggggtgggggtgccacacacttttaaacaactagatctcgtgagagctcactcagtatcatgagaacagcaagggggaaatccgtccccatcatccagtcacctctcaccaggccttacttccaatactggggattacaattcaacatgagattttgatggggacacaaagccaaaccatatcacccagctgggaaaatggattgttaatagtacctgcatacagaattgtggtgggcatgtgattttggcaggtgataagctcttcattagcattcactaccacagtgaacaccaccatcctcctcctcatcatcataattatctatccagaggatcatgtgagatgcttcaaacccctgactaaggcaatctcaaaggataatttgcctcaggtgtcagaattgtttagctgtacttgcctttccttgcaaatataatggcagaaaaagaggaaaatttagacattttgagccttttcgaagcgggaaatcaggtaagatattttcagatagataatttgttttctccttgtgctcttatcacttccttcctctttctctcccacctctgagaaccctggatgagggtagatgaagtagaggagagggtggtgacaatggtggtaaaagaaaaagtaaccaccaaacatgtacagaaccactccagcatttaattaaagcctgcagccctttgtcagccagaagctcctctcatggtgagagaggcagagagccttgtcactgtctctagaattatttgtataattcagcagctgtttccctcagatgcctaccacacgaggttggattataaagacgtatgagtagaatcgccaaggttcagacacttgtgttcactgttgagctgagagccacttaggctgttcttgtacaaatgcattagattatggttaagcagcttatggacataaaaacacattagaactttacagcactctataaattatagtttttgcagcattcacagccacaatgctaggtaattacattcattaatctactagtaagagcacataaagttgcctcccaaaccttactgtatgtgtcagtactcagctgggaaggagagtttttttcctctcctttttccccgtctttccctgttccattaagccttgtgtgggaagatttttgatgttacattgaggtgttccctaaaagaatccaataaacccattttttttttttaatggttaggctctggcaggaggccttgtaggtaatattttcatgttgagctgcacctagtaactatttttgtatgcatttattttctttttggaaatggacagatgtctcatttggaaagccagcaagttaaagcagttgaaaagagattaatgatagaatcagtggtaaatgctttttcaggacttctttttgcctctctctggtagcagttaacatgatggtccttttaattttggatctatcaggagtacaaagtattgctctcttcccatgccaaactttcctaaagtttccatctttccatatggtgataggaaatgcctccccccacagccctgtctcagaactttctcttatttgcatgtctcataaattacagaaggcagatttaggaagaaatgctggaactttatatggtgctagtatttcaaggagcaaattgtactttcttcgcattatttctcaggttaaatagaccaagtggaccaggcgtggtggctcacacctgtaatcccaacactttgggaggccgaggtgggtggatcacatgaggtcaggaatttgagaccagcctgccaacatggtgaaacctcatctctactaaaaatacaaaattagctgggagtggtggtgcacgcctgtaaccccagctactcaggaggctgaggcaggagaatcgcttgaaactgggagacggaagttgtagtgagctgaaatcaggccactgcactccagcctgggcaacaagagcgaaactctgtctcaaaaaaaaaaaaaaaaaaaaaaaaaaagaccaagtgataggctgggcgtgctggctcatgcctgtaatcccagcactttgggaggctgaggtgaaagaattgattgcttgctcaggagtttgagaccagcctgggcaacataatgagaccccatctcaatgtaataaataagtaaataatttttttaaaaagtgaaaagaaaaaataggccaagtaatacagccatcttaaaaataaaaacaaaaatggaatagagaagtatgttaacctgcaaccccaaggcaacactataagtcctgggtcatgctcagaccacattctaggcttctgctttcagttctgttcacatgaatgagaacatgaatgctagagccacgcaggtctgtgttgagtcctggtattgtcttttcatagctatgtgaccttgggaatattaattaatagtaataaaaataattaatttggactgaactcctaatacatcctaggcattacattaactaatttaatcctaatagctgcttcataagttaggtgatattattcgctccattttatatatgagaaaactgaagcttcacagggtattgtagtaattaaatgaggtattataaataaaatatccagtatgttgcttggcacattcaatgacactcattaaacacaatcttgaggatatatggagaatagatcccaccattgttcctccaatgccaaatgtaaccttttagaatgacagtttccctttttaatgacttaccagtcattaattgtatcagtcaggaagaggaattcctcacatttatttgtaatttatttactgcctgtaccaggaagtatcccaagcactttccacaaatttcattaaactttctattcctgtattccaggagaagaaatggaggctcataagggccaaggcatttgttcatgttcgtaaagccagaaggtgggaaagccagttctcggactcagatgtaaccgccaccaataaagagtagggatagcagtgaagtggtctattttcctggaatgaagcttctatggtgggaagtaatctaagcaactgattaaggagccagctttgtgcacttcaaagcagcctcagcttcggggtggagcatagagttccttttttttttttttttctttagcaggcaggaagatattcttattcccaaagaactgagaaatatttgagactatccatagtactcattggtgctgtaaggttagataactgctgagaagaaaactgattgctctgtgtaaatcagtatgctgatgagggaatgataaaactgcagggtagtaccagcgtcagcatcttgtttccaacccagctcttctctctcttgacaaaacagctgtcattttggattaatgttgaaatcaccagaatctgctggtcatcagagcagggccgatgccatctttgggatgaagtgtgctggcaacaagatagaaactggacatgggaaaaaggaaagtctccctcaaacatgctgccatccaaggcccagtttaaaccacaggctcaatttttgctcccaaactgatttcccgactaacccatctgctcatgcacacaccctcccaacctcacacagcaggcctggcctttatcatttcaggtcctgcagagctgttctctctcactgtggtactgatgccagttttaacagccgccatgtgtattgactcctctaccgattacaaatatatacgcgtttgccagtttgtttagtgagtggttttcataggctgtgatggggatttcactttcatgaatataatttgctgagcctgtggtgacatcaataaatccttctgggatggggaatggttgatttccctacatccagatgacatcctccagcccacttccttatgggaccaacagccaatgtcataacacatgcttctttgtgagagcatggaaggaaattgtttaaagtgtgtcatctgtgggcacagtttctaaggtagatacctgtgaggatgtataggcatgctttagacatggacagaatgagttatgtacttagtaactcaaaactctgctgagctcattgtggacagctcttacagataaactaaaatgcagcttcttaaaaaatgagaggacatttgcagaaagcattcttactgctttcagcaaatctatgtgccttatgtttttatatagcagtcattttctcaaatcagacatccctattgcctattagataaacacagaaagcatagattatgagtttaaaagtatcgacagcatttcaagtgctatcagagaacatttaattcagtttaattttgtgataaatctcacgtttaatcctctggttaccctgtaatcatgtctctattgatcttttctgaatgactgcctgcagtttaataaactttgccattaacccagagcttctaaaaggagagattgattccattatcaaatctgatagaaccaataagtacctaaacatcactaaatctatctataggaagctttggcctagagacaagcctgtggcttgtttaagaaactaggtaaaaatctggatatctttgcatgacctaattgcctcacagcatctgattcccttgtgcaaactgacactgcctttcatctttcaagtcaatgtagtagccaactgaaaggacagtctcttttcttgcctcaaccgtaattgtagggtctaatttattctcactgcagatatagcttgaggagtttatttggtctatgtctcaggtcagtgggtatatcttaagcacttttctgtgtctctgaaaacctgcaggatagtttgttttatttttacctatatgatgccaagggaaagaaaattctgtctggataaatcctgaaatagaagactgggggtgaagattgagagagagggaaggcaagtacagagtcatagctgtgtgaacaagctctaagacttggaaaactttccatgaaacccatatatgtttctcatgtagtgataggttatttgcaatatgtgttgaacaggaatttctactttttgtgccgcgagtatttatagctttcatcattattcattaatatttattgagtcacataggcagaacatatggaattcagggtctagagtatatttacagcttcttatttttttaaggtcagaaaggtgtcattccctgccacttttcacctcttaaataaatcggtgaaggttgtcaattttacagaaaagccaaagcttttattttctgtctagatttttattgacaatgtgaatttttcagaaggagttcggctatttgacttaggaggcatagcctttccctaattacacttcggtggggaagtggaggtgcacagaaggatttttataatgagacaatactaaactgtaatttaaaatttccttccaacaaaagaccctaatcttggcacttagaaataaatctgtaatgacgtggtgttaggcagtggaagcaggattagagccaagggactctgggtgtgttgccagttgctgattttctcactttggaaagtcacttgtttacccagccttagtttcctcatgtataaaataaaactgatggtgcctgcttagagagctattagagaattcaatgaggtgattattttaaaagatactgtaaactttttccaatgctgagttgttgtgcagacattaatggttatgaaaaagataaattagtcctcgctttatattcagaaatggtctgacctttcagtaaattatgtttagttcttaaatcaaaacccagttaggacaagagagcttgaagagtacgtatacataagagaagtctcacagagatatttgaaaggctggaaaatgtgctctggaggcaaaccctccactgaattgatgaattctaagttacatctgttgatattttttgtgtgctaaatagcctcccagtatggtaacattagagaggctgaaggaacctaagaggaggaccctacatttataggtattgaggtagattggtctctgcccttgagaagccaatcaaaattaggttgagaaaggatgtagcaattgttcgtggaatactaataggcatatatgcacttgttcatgttgattctctatgtcactgctctgtaagagaaggaatgcctgcacatcttcaataggaagttgacaacagtttctggaaagttggaagaaagttacagaattattcctttagtagtaattattccatagttctctagaaacatgacaaaacctcttgaaaaacttgagtcataaaaggactgcctcacatatatacacacacttcctgatatgctgtgtaaaactgcgtttatattcagagccacataacacaaattttgccagaagttgctttttataccactgaatagctctaaactttaaattgtctttcataaaattgtttcttgtctgctgagtggacagaatgtctctctcttccccacccttcatatcattttgttttcctaaatgggccactctgtgaagtagttctttacttctagccaccacccctgcctctagaacaatgcaaccaaccttaaccaaagtcacatatcaagagttctctgctgcctgttaatgcagatttgacttctttgtgtgtgtgtgtgtgtgtgtgtgtgtgtgtgtgtgtgtgtgtgtgtcagggtctcattctgtcaccgaggctagaatgcattggtgtgatcatggctcactgcaggctcagtcagtcctcctgcctcagcctcctgagtagctgggactacaggcatacgccaccacacccagctaatttaaaaaatatttttctggagactgggtctcactctgttgcccaggctggtcttgaactcctgggcttaagccagtccacctgccttggcctcccaaagtgttggcattaaaggcatgagccaccgtgcatagccagatttgacatcttaaaagccagagctagacatacttattgattgtcttcctggggccaggtgcagtggctcacgcctgtaatcccagcactttgggaagccgaggcgggtgggtcacttgaggtcaggagttggagaccagcctggccaacatggtgaaaccccgtctctactaaaaaatacaaaaaattagccgggcatggtgatgtatgcctgtaatcccagctacatgggaggctgagacaggagaatcatgtgaacccgggaggtggaggttgcagtgagctgagattgtgccattgcactccagcctgggtaatagagcaagacttcatcaaaaaaaaaaaaaaaaaaaaagtaatggaaactcagagaaggttgctgaagggaagctagaaggcctcctccaggacagagaagtaatcattttacacttatcacttacggtaactacaatagaatcagtgagctagttgctgaatacttctagagacattgttcacttaaagtgaaggtgtgatagtatgtgaatacctggggaagagaagaaagcgaaacatttttaggaaagaaaaggaaagtatgtgacttattactaatcaggatcaatttgaagatctgaatagattttcactggctaatcagagttattctgtggaatatctgcaacctctgcaaccacttttgatttttctgtgaatagtgaggtactgagatccagtaaattataatttggccttgatatcaagccatgaaaaagatgtttagaactaacattcattggcctctttcatttttttttctcttggggttaataaggcgatttatgttatttctaggcatctgttcatcccctctttagcatataggggaatagaaatggtttatccgggatatggatgtggtaatgtgtcttagtctgtttttgtgttgctacaaaggaatacctgaggctaggtgcagtggctcatgcctctaatcccaacacttggggaggccaaggcgggaggatcgcttgaggccagagttagagaccaacctgagaaacatagcaagaccttgtctctacaaaaaagtaaaaataaaaacaagaaaaaggaatactagatgctagtaatttataaggaaaggaggtttatttcactcatggttctgcagactgtacaagaagaatggtgctggcatctgcttggcttatggtggagttctcatgtggcttccactcatgatggacggcaaaggggagtcagtgtgtgcagaggtcgcatgatgagagaggaaacaagaggatggggggaggtaccagtctctttttaacaaccagctcgtgtgggaactaacagagtaagaacctctcttagttctattagagttcgacatgagggagggcattaatctatttatgaaggatccaatcccatgacccaaatagctcctcttaggccccacctccaacattggggatatatatatatatatatatatatatatatatgtatggttttttaaattattatttttttggagacagtctcactctgtcacccaggctggagtgcagtggtgcgatctcggctcactgcaacttctacctcctgggttcaagcgattctcctgcctcagcctcccgagtagctgggactacacctccacgcctggctaattttttgtattttagtagagacggggttttaccatattgcccaggctggtctcgaactcctgagctcaggcaatccacctgccttggcctcccaaagtgctaggattacaggcatgagccaccaggcccacccattggggatatttcaacatgagttttggaggggacaaataaactataacagaaataattagataatgtgtttgaaagtcttggatggaagtccgagaggggaagagtgatggagtagtacaattcatagcatggcccaacagcttcagaatgagaggacattcagggcatcctaatttcacaagttcattctcctttaagtttttgtttttagaaatgggctcttgctttgttgcctagggttctcaaactcctgggctcaagcagttgtctagcctcagtctcccaagtagctgggactgcagccatgcactaccaggtccagttctaattcattcttttataaacaggttactgtgtgtcctctactctgttctctgctaggaattctggcatgatgaagtcatagccattgtccttatggaggtaattctgagtattaccaggaagatccagttaccaatattttgatacactgtaataagtacattaattcttttcctatcttttgcatacagtgcttaatcaaaaaatgaataatggttgtttcaacttactttaccatcagcagtgtgcagtggttcccatttttccacaccctcactgacaagtacctcttgtctttttgataatacccgtcctaacaggtgcaagatgacatctcattgtggttttgatttgcatattccagatgactaatgagcacattttcatgtacttgttggctatttgtatgtcttcttcggaaaaatgtctagtcagattttttttaaaaagaacatattacatgtaaaaagaataatggttaattaaagcaagtatcattagaattacacatcctctcaaatgtgtgcgtgtgttactttagtggattagatttaagtgggagaaaaagcaatcgaaatttgagtgttctgcttgtctttcttcagttagcataccaggcttctgcccttggagaggcctgagaattgtgtggtgctagtttctcttctggctgccattacactatcttctgttgtatggttctttttgcctttttggactcgtcctttgtgtacgttattgccctaagccctcactgatgagattttctgcctcagtcatgctgtgctcagctttcagaatgttgttgttacggaggagttaattttttttttaaggtttccttttcgtcatgctgtatttctcagattatctggagggactgtaatccaattttaggaatccttcagggctgagagcctaaactgttttaagcaatagcatctggttgccagggactcaactactttgagcgtgttaaggtctaacggcagccaactctcaattatctgtgggaatgggagactcctgggatgttttcaattcacagagtgtgcaaaaatctcacttaaacggatagtcgtgacctcatcccacagctgagtttaggagagcttctcagtgtgtggttttgttttctttttgttttgttctcttctcacctttgacagtggcactgcagcattgacaggtgccttttatatgttgaatttatctgtacctgatctatttttttaaaccttgtccctctcatctttatttagattccatatgtgtatcattatatacattaagtatgttttaataaactgcctcaattcttttacattttaggagcagtaaaatttatttatattttctttctttgcttattggctaacgtgctcatgggaggggatgtagccaaacagtaatcaggctaccagatagaaagataagaaaactttacaaaaggttagcctctgaataataattgagaactggctgttaaaaatgaaaaaaaaaaaaaaatacgaactctaccttgtcactgaaaatgaggtgaaggccaggcagtgctcctcagtcaagacattcgtgttcacaactgagttgtctccagtggaaatttcatggctactttatggcctaaagccagtgctcccagacgtggtcatcccttggttttaggattctaaaagatgagtttcttttaatgaaaactgaatgtaatctagttgttagggataattatatgccagttgtgcatgacggcaagggcccctggtttttaaaaaccagctttatggaggtataatttacattccagtaaactgcacaaactaacaatatacaatttgatgagttttgacatgtgtatatacccatgaaaccactgccacaatcaagacagcgaacatgttcaccccaaaagtttccttatgtccctttataatcccttcttcctatctctcccaggaagccactagcctgcttgctgttgctatcaattagttcatatttcctaggattttatataaatgggatcatacataatataatcttttccgtctgatttctttcacttggcatacttattttgagacgtattcatgccacctgtatcaggaggttatttctttttattgctgagtagtattccattgattggttacaaccacagtttgtttatccattcatctattgatgtacatttgggttgtttgcagttttagaagcattgcacatctgctaggagcattcatgtgtagctcttcatgtagacatgtactttaatttctcttagggaaatacctaggagtagaacggttggatcatatggtcggtgtacttagaacttttaaagaaactactaaactttcttccaaagtggttgtgctgtttcatattctcaccagtagtgtatgtatgagcatcctctgcatccttgcccactctcggtagggtcattctttcttatttcagccattttatatgtatgtagtggtatctcattgtggttttaagttgtatttccctaatgactactgatgttaactattgttttatgtattcattcactttccagacagatatctttttttttttttttttttttttttttttttttttttgagatggagtatctctctgtcatccaggctggagtgcagtgacacaatctcggctcactgcaacctttgccctctgggttcaagcgattctcctgcctcagcctccgagtagctgggattacaggtgcatgccaccatgcccagctaatttttttgtatttttagtagagacagggtttcacccgttagtcaggatggtctcgatctcctgccttgtgatccatctgccctggcctcccaaagtgctgggattacaggcatgagctgccacacctggccccagatatcttctttagcaaagtatctgaatcttttgcttatttaaaaaattgggttgtttccttttttagttttgagaattttttttttttttttttttaagatggaatcttgctctgtcgcccaggctggagtgcagtggtgcaatctcggctcactgcaacctccacctcctgggttaaagcgattctcctgctcagcctcctgagtagctgggactataggcgcgtaccaccacacctagctaatttttgtattgaccaggctggtctcgaactcccgacctcaggcaatttgcctgccttggcctcctaaagtgctgggattacaggtgtgagccatcacacctggcccaagaatttattaaattaatatattctgtatacaaaacttatcagatacacattttaaaaaatatttttccattctgtggcttatctatttatgtatcttttactctcctggtaactcacagaacagtcactttattttcttgacagtatcttttgaagagcaaaattttaattcttgaagtgtaatttatcaatttattcttttatggattatgcctttggtgtcatagtaagaaatcttagcttaacccaagattacaagagttttctcttagaaattttatggttttaggttttacattcaggtttataatatagtttgtgttagttttttctatttagattgaagtgtggattaaaattttgcatatgattacctattctatcaccatttgtttaaaaaacttatttctctgtagaatagcttttgcctgaaaatcagttgttgatatatgtgtgggtctctttctggactattctgttcctttgatctgtttttctatctttatgccaatatagtgatgcaattttaatgtggtgtgaaagatggcactacagagcacctgacttgctcctcctctaacctactttactataatagttcactgattagcctgtttccctggataagcagcctgagtttaggaattctttcttagatatttccaacagatggcaatgtgtatgcacatagtaggtgttttgatatttgtttttaaaagatgtgaatcttagggattaatgtttgaatgccatcctggatgccttgtacattcctacagatagtagtcttctctactttctaaaaagtttaggctctgaaaatctgttcataaagtccatttgctcaaaagtccaaagttggggactgttgtgaacatatctatctagttactagttttctaatttttcatttcttatcactggagactcattattggtagaatcagtgtttgtaaaaccattcaaaaacaagtacaaatggtatacaataaaccagcaagggacttgacagaccaaaatgacaggacacagccattatgtcattgtgtcattggggacaggcaaagcacttttttctttttctcctggcttgttattttctttaaggtctctaagatcagataactaacagaagaggctcagtttaaattgcaagcccctcacatacatatacatgcatttgggtgcatgcagacacatataccacaaatactttgtaagtgatggactgccctcaggttagtttgcttggaaaaatcaggcggagactttctataacccacttcatgcaaggcagacaaattgtgccctcattttctattgtctctggcttcatctgtaatcagcaaatggagccctgcagcttacatagtgtttcatctgctatttgttactctcccttagtttgcacaacactgaaccatctcattttgaaattcaagagtggcgaggaggcctttggtggaagattgtaatttgggagaagggaaagtcaagagcaagatcgcctattttgaagaaggcggggtgttgaaggaaattgcctttgtcagtctctgagcctctccatatatgtgctactgtgaccctgccctccatcaccagtgacctaaaaatcacataatttcaactattctccaaacctattcacatctgttgtgcatggcttgtacacttaccccctctattgacagccaatatgtctaaatctttttgcctctcagccagcctcttgttggtggctccctggctttcttgccttctttcctgcttcttctatgactgtcaaatgaatgccttaaagcgttttttttttttttttttttttttttaacagatttctttcttatccttctgccctcctgcctttctctcctagtgcttgtgtaagggaggcagttttttttatctttaccctgttagggtctctagctgaggctgagtattaaattgatgtaaaatagattaacagaagaaaagcatatggattttgacacatatataggagcccccacaggaaagtgaagacccaaaaagtggcaaatcttgaatccttatttagtaggttgaacagagtggccgttgtggaaaagtaactaaaataaatgatgtggctaaaggaagataagagttagtaagatctgttggtacaaatttttctggactccccatgtctagaaacgagaaaatttcttctttcctactatagggagatcatctttcacatgagagttttttcccatctcaggtgtttctggtgataatgtttcttttctcctatctcttttgtttctatttttcaagtgcctttagctttaaaataatccttaggcctaaatagcatgttttggggtggcgtgttctgccactcttcatttgctcatgctttccttgcagaatatggactacaatcatcttattttcaaaaaattcttcaggtaattctgatggacagtttctcttgtgaaccactatcctagatcatggtagacgaatgaatcaacaggcctttgaaaattgccattcattgatcccaaaaagtttttttatataccagataatttccctccccatattatagcaatactagagactgcccaggtttccttaaggaagttcttaaattagtgctactggttggttggtggtggaggaaagcattggtgggtgtatatttacaaacaattacacaggcatgtagtcatgtacacaactcttgtgactgttgataagatgattagtttatgatcagtctttgtctttgattcttaatgcttataatggatagtttttgtcatttttctccaagacagtctgaaaaaattaaatagttattttactttataaatggtaagcagtcagtacctgtttatagagggaatgaacaaagagtggtctggtttattcaggatttgtaccaaaaaatctatatagtaatttataaataaaggtagatctttgaaaaaaataaagataatctctagtctctgaaaatataaacctgttacataataaaaagttgttatagactcttcatttcttcttacctcttaagccaccacctctagacacactttgatcctctctctctcttcttccccccccccgagtggaaaatctcaatattaattggagctaagatgattgtactactgctgctaagacttcagcaggtctcttacaagctaatgtcacggcatggggtccatttgctctgtgtagctattctgcagtgcagtgagaattccttgattaatatgctacatgaaaataaaatggatttggaaaaaattatagcatactctcataaatattaattcacatttgtatggaattacacataattttcaatatactttggaagcaccttcagtatgaaagatttggtctccaaagagaatggcataatttttttaaaagcacagtggatacattattaagcatcatttgtttattaatctgatcctctacatgcatatgatgcagggcagtaggtgggttgtgtgacaaagaaaggagctttataccctgtggggagtttttatattacacttagaagtggtacaatttaatcacattatatagaagcagcccatgatggaactcacctggctccctctgctagtgttgccattattcctgagtgtctctttatggcagctattttggttaaatgtgagactaaacacagaacatttttgagctgagcagatgcctggcatagctgactgaggttgtggacactggacaaaggaattcaattcagcagccattcattgaacatttactatgtgttaggcatagcatgcaaggctgtgaaatcaatggccatgtgcgcttgctttgatctcgacttgtcccctgaaacacttttcaccacatcctcattgcctcaggagagctacctctccgatggcagagggttaatcgtctgcagtggtagcagctggaagttaggccagaagctgcttatttgccttgtggactgttatctttgatatcttcttactcttaaggataaggcctttccccttttctggggtttcttgctgtttgctgtgatccttcgtgtataccagcagtgcacactagattccttggtttcctgcttctatcaccctttctggcttgctacactgtatgttagagacagcttagactattttaaagtcagtattgtgctttataggtttggatgttttaactagttgactcctttatttatgtatttattgactaatacattggccacctactatttgcctggtttatgtgaagtacttatgtgaagcactgggattactgagatgaactacttagtccctcccctctttcacattctttcaagagattatgcacccagctgcctcaaggcctttgcacaagctgttctctctgttcagcctttcagatctaggtcaaatagcagtcattttctcagctctaaccctctcctctggactatatcatttcccttagttttagcacccataacctatcctttagcgttgttaactcagtttgcaatgatatatttgtgtgatttgattagtatttgtcctgtaaattctaggctctatgagggtggtgacttttccccacaccattatcatcctaaacataggtcagtgctacattggtacttggcatgtactgggcacacaaaacataattgttgaatgagtgaagacctgagaatagagtactttgtattacaagaaaggtctccctgagtgggcaacactgctaagagtcactgaactagaaaagggaggagtgtgtaagagaggccttttgaggccaaggcaaatcagtgtaaaggcctgcgttagtttgtccaggctgcattagcaaaatgtcataaactgagtagcttataaacaagaaacatttatttctcacagttctggaggctgggaagtccaaggtggaggcaccagcagattctgtgtctggtgagagcttgtttctcatggatggtacctgttctcacatggtagaggggcaaatagactcccttaggccctttataagggcactaatccccttcatgagggttccaccctcatgatccagtcaactcccaaagtcccccatctcctggccaacatggtgaaaccccgtctctactaaaaatacaaaaaaaaaaaaaaacaaaaaaaatggctgggtatggtggcaggcatctgtaaccccagctactcgggaggctgaggcagggaatcgcttgaactggggaggcggaggttacagtgagccaaggtcgtgctgttgcactccaacctgggcaacaagagcgaactctgtctcagaaaaaaaatatattctggggagacacaaacattcagatcataacaaggctcaaggtctcagactaataggaatggctgatttggggagagatgtcagggagtaccatgcatgtaaagttgggagtgctgggatattgcagcagaacagtgagaaaattggatgtgaaagggaggaaagagagcggtattttaaggagaaatgagtaaaaggaaatttctattttggttttgttttatttttaaatgtacatttagatagtaaaaaatttaattgttcatttaaaaataactaaaataatataattggattgtttgaaatacaaaggatacatgtttgaggtaatggataccccatttaccctgatgtgattattacacattgcatgcttgtatcaaaacatcttatgtaagtcataaatatatatgccgactatgtaccccagaaatgaaaaaatttttaaaaagttcatttaggactgcagaaactgaggaagtgtggtaaggcttcatgagggggattttctgtgtaagaggattagatccactagtttccaaataactgagtgccaaaacattttcattttattgcttagtgtgtgcatcatttctcacagggcagaggatatttgcatgtatgtggtttgtttgatgttctgagagcccattttgcacgtggtctcagagttgtagtgacttactccacttctgataatgaataatgtcagtgtccggacactaaaagcccagtctgttggaaccttggtgtgtactgagctgcctggaggcacagaactcttatcaggtcatgtggcctgaaatgcttacctgtagtttctacagatgcagttccccattcaaggacattgatttcccatttcctacccacctcccctcatccccaaccacacacaggaataaattaaaagttgctgttgatcttggtgataatattgttgttacattttgcaaagaaaatggaaataaaggatgcttagaggaacatgtaaaaaaatataatgcattaaggaaacattttaatcatatgaatagacagttctttcttgctggctcacatccacctggacctgataaattcagttgggtgctatttcttttgaattgagcatgcacttagtgctcattttctgaaacataattgatgtaccaacttgggaaatgagtgtattgcacttccttggggaaggtcattgtgtgctggacccagcaccaaatcgaacagaaagctgctatcccagggagcagtgaaatcacttttgatgcatatacttgtgttttgtttagttttctgcccagtaataatagaaaggatatatatatttgtgatggcattaaggattcaggaaaattgagaagccatgtttcttagttttgggtcttctcatatcccactttcctatccctctcccacttagtagtaacaccctttagtatttagcctatattttgggtgtgaccctagatacctttgtaaccaccacttccctttccttctcttcttttctacagaaagatgtagcacttaagcctcaggaacgtgtggagaaacgccagacgcccctgaccaagaagaaacgagaagcacttaccaatggcttgtcctttcattcaaagaagagcagactcagccacccacaccactacagctcagatcgagaaaatgaccgcaatctctgccagcaccttgggaagagaaagaaaatgccgaaggcactcagacaggtgaggaagcttgggttcgctctttcctgtggcggcaaaatcccttccttaggtgcttcctccactgtggtttttcgtaacaggtggagaagatatccttggtgggatgctgaagtggttgtccaacaaagctgtgtgcgtgcctttaaaagaatctaaaacccaatctcagctctttctatgaggatttgaaacttcagcatggtgccctttcagtcagatgtgctttatgcaacaaagcttgatgctaagtggtactggtatttagggcagacctgtcttaacagttgtcaagatggactggcttgcaggggagagatctttgcaattaggataaatggaacaggtggatttcatcacatacattgtgcatctcatggttctaaggtgctaaaatgattgcctgtgtgtgagaaatgccttgctaagatttatattttccggggaagctcagatattgtggcatctgggagggcaatggcaaaaaatgaatttgccttttggtgtcttagttgttctccataggctataattcaagactatctttgtgatctgttgattgtatgaacgtctgataatgaggcttactggcctgttaataattaggtttcaatgatccacaagaaagtatggctcttggcatttgggaagcctttctgcctgtggaaatccccacatgagatggattaataatgagatatgaagctgtttatagcagtttttctgcacaaatccagaggcttcagtgcctgtcaagttagttacctgtgtcctgggtgtgttttatttatttttggcaggaccattgggtaggattgactatcactgaagaaagcagaggaaggaattgtggtgtacagagcaggtgctgctaattagaggtggaataggtaatttttggtttgcagatgtttctctgcagaggcagggagatctgggatcaaacaaaacaatggttcccaaaccacacagatcttgagaatcatataatgagagctactaaacctaaatttctggcccctctttaggacctaatgacatttgtagttttagaaagtttcctatttgaaaacagtcagcctggttggaagtcactcttacaaagaatcaagagtgtatttgggtgatggtttttagttaaaagattggaaagatcaaaagcctcaatatgatgtagtgggcagtttggtgtcagaattctgccttatacgtagtgaagcatataatcctggtaaaacatctggggtgatgggtttcagatggacccagaaggcttccaaggtaatgcctaaatctgacaaccagcacagtgtttccaaaggtacacttgtgtcctgaaacgccagactggagttataatagtaattattaacatttacctaatgcatactatgctacattcagtgagggagtttttatagtataacctataatttgtacaacaaccctgcctagtaggtaatatcatggttacttaacagctatggaaacgagggctcaaagagataaagtgacttgtctgaggccttgtcaatgagggaaggagccagggtttagacccagatatctctagttccgtggtttgttctgttttccatatttagatgaagttttatttatttttttcttgatagggagttggggagagggaggaaagcctaagttctataaaaggtgatgttcctgtggtatttgtgactcctaactcatgcctctgtgtgagatatgtgagaaaagtaattaatctcagtggagagagattgcaatgtaaccacccccctctccctcaggcccccgccccagcagggtaagaaggaagccttcttactctgagttaacaccaagctgcggatcctcatccttgaatctttttcttctagacgtgatctgacttttctattctgtgtcctcagaattattctttgtatttctttctacttcttcgagactttcaaggtcctctggtgacagagttttatgatcggaaaagaagactaagacgtaacacatcttaaatttgagtagcttttggtcttaatggccaactctcttgtactaatggtatttgaaatcaaagctatctttgttttaggtaacatatttgaaaagcaagtattttgactctttatgaatcatggagaaggaaagcatgaattgtatctttggccctatgtaaaacttttaaaaacaaggagtattttcttaccttcagtgttgatgccaaaatatgttatccaatcaagtgttatatttctagtaagaaggaatgcagaaggtgataattgagataaggccataatacttctcatttttaatattcttagaatcacttgtgctattatgaaatcccaaacaagtcaccatctggtaacagcccatctggaaaatgaagggcttggacttgaatgtttcttaggctcctccctctgggtcccatagttttttaaatttatgaataacacaaatacagtgttgtaaaggtctgtaaaggagtctgtaggtctgaaggtaatgccgttttggagtcagtctgtaactgataggctctgtgaagacatttatttatttttaatgtttttttttctttaaaattttgttttcatgtaatatgaagacatttaaaggagaagggtaagatgcatttatagtaggagggaggggagtggtccattgtgtgtcagtccagacaactgccatctgttatgtgatcattggtaaaaggtgacacatgagtgtttaatgaccatagtagatgttcaaaaagcttgtctgaagaatactcgtgattgctttcctatcatcctagatgcctgtaaatatcacaattactttatcgcctgcgtttgcctcttatcaggtaaagaaactgaatctgaccatcttagctgggaggggaccttgagatgagagtgagctttgaggagcatttctacattaatggattgtcatttagtgcctgttattgagaactacagatgaaatagggaagaggcgagaacttagtctttatttctgacttggttagaatgaattaggtttgcatcttattaggaaatggtacttcctgagcagacaacttaatgcacagctttcctgtaattatgggaagatgttactccttagtagagaggaaagaataggatttttttttctgagactccgttgaaggcaactgatctttttactcggagggtgcaattataatacttttataggaaagatgtatagttctaaaaccaaactgcttattctttcacttgcctggttgtaaaacccaagttcttgtgatgtttttccatactaccaaaagaaagcttttaaactgacacttatttgttggattatgtttttaagtataaatacatactgccttagaagatgctgaggtggcacctgtcttggcaaatggttgcactttttgatatgagaaatttgaatacttttcttacttcccaaaggggttaaaattatgaagaaatcaataaattacctcttatacaactcttatacaaaatagcgcatgtctttctgacctctgtaaatgaactatttgttcatgatgtaagcacttagacatgatataaaaaaagttttatcatttacttacaaggacatggtactttttttttctcaatggagatttgggggtgggaaaagcaaaagaggttgcacatggcctctccttaaggagctttattctctaattgggagaccaagtcacaatgaaaccactcaggaacacaaggaagtcaggtgtcgctaaaccgataagccaaattataacttcctgagaagcactttgggaaaacttaacccttcccagggcattgagtttaatttcagtatatctgacttctagaccatggagaattcttaaaaaatttaggactttgtagtttaaaacacacagagagcaaaagggttttaaaaatagagtaccaatgatgaaaagttgatgagcattcagagaactctcagatttggctctgactggatttctaaatctccatttagtccattagtctgtcctttctctgtagtatcaactgagccagaggaaataggcttaagtgagctagaaggcatttttaggttatatgaactcttctaacagacaccaagatgaatcatcaaaataaatcctgtggtctccctccttaactgaattttaggtgccaaaaagccattcatcttagggcagaatttcctaaagaaagaggcaacctgttgagattgctttagtcacaggagaacatcattttagaggaaaatggaggaatttgtgaatatttcaggagcctgttagtagactctaaccttgctggtaaggatggcttatgtgggaatgtcttatgtggtttaaaaatctttatacaagttgatctgggtaggtatttctttttaggaataaaaatttgctcttctctctctgaaaatccagtatggtgggagatttgtagttgacattgtaaactgtagacaccaaaagtgtctactgctttctaggaagaagaggaatccatcccagtgccaggcatttaaaattagagtgattactagaactctgcatggttgcatctgcttcatgtattgacattgtaccttggtcttccttggagtaagtgatagtggtgctatagacttaagagcccaggtgactgagccaccctctcttcccacctgtcctgatggaacagtctatcccagcccatgctctttcctgttgagagtgtttgctaccagaggctggtcccttatttcagcacgacttagacttactgcttttgtctgaagagctttctctaaatttgttactagtagaaattaacttgcaaaggaggatttataatggaaaactttgattaaacggatccagttcaagtctcgtttctgaagatctgctaattagttttggatggaaatctaggccaaaaatcacacaggtatttatccagcttgactctagagcctacaggtttctggaaatcagagcatttgagacacgaatgtaatttgggattttactgtcataatgaaaagacatgaactttgctatgtgctctttcatacatacttttgttataatatttagatgtctgctggtaccttgaactagtattaagaatgtcagttaaaccgtttctacctcatacttcaaaatttcaagtttaccatgttaattgggatttcatttgctttcgaaaaattttgtagtcatgtgaaggttacaagctaaggtatcaaataaaattctttatatttttttcctttttatgaatttaagttgcatactactttttccccttgcctaaagtatagaaataagaaaaactgtaaggaaagatggagggaataaaagattggcttatgatctctctttggaatattgattgacttgaataagagtgagatgctagttttaacatcaggtaattgaagaaccccaatctaggcttgtctgtgttcaggaattactcacgtattgtattggaagtattggtttgtaactgggattggtaaacctgacactaatataataatgagttatatgaaaggtgttttgcttttgttttatcttgagcatttggaaacaggtttattcgtgtttttcattttgtgtcttttgactctatactttgttgctgtgagccctgaatgttgggaatagtgagcataaacatcacttaacttcagtgagatacatctttggaatgttatgaccagtaataattttatcctaaatgacatttgtaattttaaataaaaatttagtaaaaattgactatgaaaaggacatagcatatgtattaggattctctggagagcaagtaccagtagaatatatatgtgggtagataagaggggattcattcggggaatttgttcacatgattatgggggctgagaggtcccataacaagccatctgcaagatggagaccctgggattcacagtatggctcagaccaagtctgaaggcctgagactggggtagtcctcaagtccaaagcctagagagcctagagtttagatgatcaagggcaggaaattatatcccagctctaggagagagagagagaccatttcgcctttcctctgtttttgttttatctggacacccggctgattgcatggtgcctgcccacatggagggcagatccttccctacttagttcactgagactcacatgccaatctcctctggaaacaccctcacaaacacacccaaaggtaatgctgtaccagttctctaggtattctttaatccagtcaagttgataccctaaattaaccaacacagcacattaactaccacctcataaaataaaacctgcagagagaaaataagctgaatgggaaaaggaactgcaatgaaaagaatgggccataattcagcttgggtgatcctgatacctacaggagttgttccataaaacagtgaccttttatatttcccaaagtaagaaaattttatatgtgtatttgtgcatgcagaactttattaagggccatttaaatcccatatattgatagaggagttaagaaagataaagtgacaggagtgattctcaactctggctcccataaatttctacaatgtcagtgattgaagaatgagggagcacatctttcctttaataaggcctagccagtacacttttggtagttgatgagggtaggacagaactccctttctttatttgaaactgtgtatttttgtgctgattaaattttacatttttccctcttgtgatgatataaagttatctgcatgtggccagatctcagctaaagaacatgaaataagcctctgtacattctgcattctaatctctgttcacagcaatcttgtatccacacaagtctgtacatgacaggtaatgagtgggaagtgggaggagatgggtgtctgtgtggtttgcactggtggtggtggggaactgagcagatggttgtgatagccacatgctgcgtgattcccgtgggagttgatggtggtgacaggcgactcacaatgtgctatttacagtttgggtttgcagtctttcggtgacatctgaatgctctttagcaactgctttcattactgcctttcgaggagctgttaattgaaaatgaaattgtgggtgggctttaagacaggcagacgcaggcaattctgtgtggtaaatgttgcttgagaactgttggatgtcttcatgcccaatttgtaattcattttctaagactgtaaaagccaaaggtgcatttggagattcagttatgtatatacataggcagagttgaatgtcacaccttgcccaaagggtcaaacatacagttattggtatgggtgctgtggttcacgcctgtaatctcagcactttgggaggctaaggtgggaggattgctttgagcacaggaattcaagaccagcctgggcaatatgatgagaccttgtctctagagaaataaaaaaattagctgggcatggtgacgcatgcctgttgtcccagtttcttgggatgctgaagtgggaggattgcaagggcccaggaagttaaggctgcagtgagccatgttcacgcaactgcaccccagcctgggcaacagagcgaggtcctgtctccaaaaaagaaaaccacacaaaacacctatttgtctggaaaccaacctaggggaatgcttggcaatcccagctgcctgctcatgtcttacctttgtgtagttctctttaaatgtatacaactgtgtgaggttcttatgtaaaatctgctgacatcttgtagtgttctctgtgagtttatcgtaggacttcatcctcctttcttcctttagctcttcataaagttactatgcaggagtaaatggttatttgttctcttgaactttgggatacatttttccttccgtatccaaggaggattctttccaggactccccatggatactaaaagctgtggatgttcaagttccttaaataaaatgttatagtatttttatgtaaccaacacacatcctctcacaaactttaaatcatctctaaattatttataatacctagtacagtgtaaaagctatgcaatttgttattatattgcattgtttaggcaataattacaagacaaagagcctgtgcatgttcagtatataagcaaccattgtaggccacatttttggtctgccattggttggatccatggatacagagggccaactgtatcatattcaagttcttacatataactttgtttcttgtaaacattttcatatgatacaactctgttaaaggcagttggagcccagaggcaaacaagagaagaaggaagagagagggtggattttattggactttgacagtggttgatgatcttgattctcttatggctgcccccagctgcaggattgtgatttgtttcttatcttcagagttgtttgctaaagcattagtagcattactgaaatggtagcttttgtaaatgtttatatgttgaattgttttattgcccatagctttgcacagaaatcttgtgctgaacaaggaatgacctccctcttggaagtgctgttaactctctttttaattaaatatgaatatagatacaatataactgcatttttttagttttcccttgaacatttcagtgaatactatctgggacaaaaccgtgctgaattatacgctttcactactatcactctttgctcttagagagcccccgaggcttggggtgaggagacacaccccttgctgtacttaaccctcagtcccattagacctgctttgccacaggaacccagctgttttaatgcatttgagttgctgttgggtcctaatgatgtttaaaagaacctgtcttggtattctaaatgaactctggagcattgcctattgatgcaagtgttgatgattttatatcaggcagatataactttgttatttactctggggctttttacacctaggggtgtgcatcctcacaccagtgctcacaaagacacacacaggagcagaaaccaaaatagctcacaaatgtgggcaagtcctgtgggggaccaccttatgtctctcaggaggcctgatgagctgtgccatgtggccttctggaacattatacctgcattcattgatcacagctctgcagaagctgccacttctcctatgtgcctgcctgcagtgacgctgatgtagcaggtcattctgtaatcactgtttgcacctgcatttgctcaggaagtgtttgctcatacatcttgaaatcatgtattacaaacctggacaggtcctaattgctggtgatggttctgagaggttgagattggctataattagatggagaagcaattagctacatattctgagtagggaacatacagaataatgtttctcaaagggtggtctttgaacccctatgtcagagcaactgtggatcttttgttaaaatgcagattcccaggtaatcaccttggcatagtccattgggtgggggtcagggtgtggcaacaaggaactggagttccttcagtgactccagtacaggtgctgcaggagccatatttttaaataaactgtacttattttttattttcaattaaaaattgcaatattgttagcaaaacttgggaagaatcataaaattgtaacaacatatcttgcggaaattaattttatcaataattggatcatatttttgttctgtacatttactaattgagttatcttccaaaatgtattggcaagaaagaaatgtttctgccagatgatgtagacattatataacaaaaaatgatgttttcaaaatagctactttttctaggtgtttactagaatggacctgatagaataattgtattctagtattctctccttaggcccactggctcactcaaataatagctgtttataaagatgctaaccggagttttttatttttcatttttttaaagttctaatttcttgttttttcccatctgtagacaatgatgatgagctcttaaggtttatacattttttgaacccttcaaattacaaaagttggtgatatttggtactgggggtcaagtgtgaaagaaatctgaaaatattgcccatatcagtggagactaaaggccatttgttattttcttcattaccagcaaagcttcagtttaataaaaatattataattgaatttacgattttgattccacaaattcaaaaagaaatattttcctttctaaagccaaacagaataaaaattctcataagaatttttgtttaaatagcaaaacctattcttaggatttaacaattgcctgaggtttgtcaacagtaggtagcattctttttttatatattgctatgaggccaaaaatgctattttcctggagattagtgcaaaataatctaccgaatagttgctaatgaaattatcatatgagaaagattattaataatgacttttgattttaaaaaatactatcatcaaattttcctaagaaatgatgatgagaaaagcagttttgaaatacaaagctgggtggtagtgggcctggtgtgcactgctggaaggttgcatggtactttgtgaaacttcagcagcccacttgcataatttatcattacctgtcccctacctctctctacttaattctgaatctgtatttctcagataaacatggcagtaggaaggatagggaaaggtgttgaggggatgtgattatatggatgtttttgaaggggagtatattggtgtcatgggatccttgggatgtcatcttgccagctggaatcctctgtggcaggggtaccttctctctgagtattgctcatgctcactgggcactgggcttgttctgcccagttggcccagcaggctgcacttggctcatgctactggcccagatcccacacctgccaagggcgagccaggcgtagagtggcaaggggtgtgtgggtgagtatattagttcttttccacgctgccaatagacacatacccaagactgggcaatttataaaaaaagaggtttaatggacttacacttccacatggctggggaggcctcacaatcatggcagaaggcaatgagtagcaggtcacatcttacgtggatggtggcaggcaaatagagcatttgtgcagggaaacacctgtttttattttattattttattttttatttctttgagacggagtcttgctatgtcacccaggctggagtgtagtggtgtgatctcagctcactgcaacctctgcctcctggtttaagcgatcctcctgcctcagcctaccaagtagctgggactacaggcacctgccaccacgcccagcgaatttttgtatttttagtagaggcagggtttcactttgttgaccaggctagtcttgaactcctgacctcgtgatccgcccgcctcggcctctcaaagtgctgggattacaggcgtgagccactgcacctggcctgaaactcctgtttttaaaaccatcagatctcttgagagttactcattatcacgagaacagcatgggaaagacccccatgattcatttgcctcccactgggttcttcccatgacatgtgggaattctgggagttacaattcaagatcagatttgggtggggctacagccaagccatatcagtgagtgagcctggggtatggccactgctcacagccaggcatgcctgctgctgcggcagggtgggcagccccaggcaccagaacaggtgctggctccatgcaaggctgtggctggacaagatgtactgcatgtggcttccactgtgggcacccctgtctggatgagggcaacaaggtggcacccagaagcttggagataccaggaaccacagagccccaaagagggtgtcacagccctgcctcagggagcccctaggtctgggctccctaaagggccgcagctcttctctccttctcattaactgcaacgtggcgagcaggggggaaagtgtgtttcagccctgtttgtgttacagctcatcagtgctgccattcaacaggtctcgagttcatgtcccatgcctaggaagaatgaggtacagcagacaactggagtgtgagcaaggcagagaggagctttatttgatccacagaacagctcccaggagacctcaagtgggtaactcctttccacaggcaggtcatccctatgagtgtccagctctcagtggagaggcgagccgcagtggtagctcctttctgcagctggtagtccgatgtctgtttgagcctggctgagtctcgggtttttatgtgcttagaagggaagaagtacatgttgattggtccatgggcaggcctggaaaaagcaccatccgattggccaaatggtcatcaatgaagtcttcactctgggcggcagactccaccgggaactggcaccctggccgctaggcttcaggttgtccctggcttgaaggtggaatttcactggggacctgtccctttctgccctgaaacctgtctgcctcccaccatcaatgtgccatccatggcactcaggctgttgatgccaagggacacctgtaggcccacgctgagccaccttcagtcctaccttggcctccctcttgtgctcatgggtgcccaaaatctggagggggtgctgaggtggcagggggctggcgtgtcaatgccacccgagtgcatgcatgcctggccaggttgtgacagcactcaggcttagcctcaattttcctctgaaatcagagtgggctccaggtatggggagaagccaggtatggggagaggccaggtagcgagagtaggcacttccaagactgctcgggcaggggcacttccccaggcgcctgagagctcagggatgcctgggtctggagccacagctgggcagctgcatgtgtgcccaggagcatgaatctccctctctgccaactcagtggagggtggggctcctgcctgttcctggccccagccggctcctcagagcatacagccccggctgcagccagcatcttggcagcggctgctccagacaggctgccactgccatcactgggaccatgtagggagtatattagggctgccccatggttctccagatagactaaggagacaaattgacatagtacagtattagaaggaaagaatatggagtttaaaaaccgttttcatggtcattctgcccctgctcttctcttccccctttcaaactgagcagacccatatttctcctttcatctctgtccttgagcctaccttcagctctttggctttcattttactccctccttccacccagtgtcttttgctagcttcttgacccagccaggattgcatgggacatcacttagatctgctctcagagtcacaaaatgcctttgcttcctgtttccttgttccttttactgtgctggttcttttcggtaaacttttagatttatcatctctagattagtgcagcattatttagctcattgctattgtactctggtttaaaaaatttcagtgaccatccacagccatctaaataagattgaagcctcttagtataggacattttaggccctgactaatcctgctgcaatgtaccttcccagttgcctttcccactctctgtaaacaccaagctgcaactacaactgctatttggatgaaccctgtgttttctccacattcctgtgcctgtgctttggctattttctttgtttagaatattcttttttgacatatttgtcttccattgactagttcagacccacttcttccttgaagtttttatgatctttttccttgtaagtaattgcattgtcttcccaactcttatgatcctttgtttataacaagggtcaccccagaatttatcagctaatttaggacattactgggaatgaaagggggaaccattaataattaccttggaacaataagcattaatcaggacttcctgaaaaactgggatatatagtcactctgtaattcacttttggcctttttcataccatactctgttttgagttggaggtatacattttcttctttccactgaaatgttgagctcctcgaggacctcactgtgtgacacagcaaggggcctaggcttatgtcacatattgggaaacaacacccttaaaaccactgctatcctttactcgaggatacccttctcatatttatagtttccattcatgtctctttccagtcttttctccatatgctagccagagtgatcttttaaaaatatacatatgatcatattattcccacaagtaaatcctctcaactgcttctcagggtattcagattgaaaatcagactcccatcatctgcagtgcccagttatccagtgctgtttcttcagcttcatgtcatgcttcccttgcttactggctccagctcccgaccttccattccctcccacatgccaagttccttcgtaccctggacaccttatgctatcctctttggaagaaatggttccccctctgttttttgaatgatgagatccttctagtcctttaggcttgaactgaaatgtcatctttcataggggcttttctcgaccatatggtttatttaactcaggatctgccatttgtcttctgtgttttgcactcacctttttaacttcctaacaccacatttataattatagatttttctttctatgtccttccttatgtctgcaccttctgctgcactccaagctctactgaggagagatatcacctccaccacagtgtttgtagcacattgcctggcacacagaaggtggcactcaataattaaagttgagtggtttgaataatttttgcaatggatgacattgctaattccacactcctgttacattccaactttaattggctacaaaaaaaagcacacacacagacacagacacacacacacagacacacacacacacacacacacacacacacacacacacaaacaatccagaccccaatacagtatgactgttgtcttctctctctggggatatgcaatgtaaaataagatactgatgagcgcatgctgcacaccaagcaaaaatttatcccaagcaacccctgcgccctgcgtggaccgtgtctgctgttctcccatggaatctatcagcagtttgtcttcccagggttgtagcctgtcaggatggtagaattgctagtgcagccaggaaaagctgacctaggaaaaccatagccttccatctttttagaggtaatccaaaagagactagacaagcagaaagacggagaggaaagttggtgggagtgaggtgaaattcactgagtactcttttatatgcaaatatttgtgtggggctctacttttttaccatgagtacaaactctttttagtatcaatgcatgaatagcgtgtcttttcactgaaaaattattgtcccacgtgccctcggtttaaaatgttttgatcttagaaaacagtttatttccttttaaagtggcccaattaattcattttccacatatttgctcattgagcaaacatcaactgaacatcgtttgtgtgcaaaccttatacaagaaactctgacataacagggaggatatgtttaatgataactctgcccatgatgtgtttatggcttgctagatccattctgacccacctattgtgaagagttcatggagagctcttaacaacaagtgaggctgaggctggcagattaaatgcagttcaaagggagacaaggttgaacatctcctagagagggaataccttcagagatacatattaaagttctttaaaattgtttctttcttattgtgccatttttgttgacctcccttctgtccttttaagaaacttttgagaaaaatgcattattctaccgaaagcatcggcaaatgttggaaatagtattttgtgtatcagttttcttggctgcttatttttaaaaataaaggcttaaataaggttcgcacatttttcactcaggtgcaatttactgggaattacctggcgcattggttttatgcttaatatttacagattattaaaatctcagtggctttcaaactgcatggaccaagaaaataggtgtattttctagaaatggttttgcttatggacactgacccactttgaaacgacttactcttggaactcttagtacaggaaagtcttatgtttctgtctagaggtggaactgtttatgataaatagaaatagctttccttttctatcatttctgttttcttggaagtagattatttttgatgcaagtagaccttcagaatttgaatagaaatttttatttatttatttatttattgagacggagtctcactctatcaccaaggctggtgtgcagtggtgtgatcttggctcactgtaccctctgccccccgggcttaagtgatccttccacctcagcctcctgagtagctgggactacaggcgcacaccaccacacctagctaattttttgaagagatggggttttgccgtggtgcccaggctggtctcgagctcttgagctcaagcaattctcttgccttggcctcccaaagtgctgggattacaggcgtgagccaccgtgcctggccttttgaataaaaatttagacttcagatttatatagtgagtatactgatgggagattgaacaattacgtgatctcaggagtagattatagagctgtttctaatttactatcaagttatttttttcccaaaagataatttataaactgcttttttgtttgtggaaatcctgtttgttaggaagtgttacaaatggtagtttcccagtgaatttatcaaaatgctgtttattcaataacattcactcctccaaggatactactcactgtcccttgacattcattcattaaatatttattgttcatgtactgctatggacagacataattttgggtgcttatattagtgaacaaaataatgaatacatctgccctagtggaagttacattctcttcatatattaaattctcttagtagtatacagcttccatttaaatgtttaacccagacctttcttctcaacttctagattcataaactcagctccttatcagagttttgctgcctagatcattcacaaacatttcaaactcagcatatctcactttgaaatctataatggtggtccccaaattgctcttcctcctcaatttccttccttactgtgtgcaccatctgctaagcatccaagccataaatctgttcatactagaaacctgcaagtcaaactcctcttcccctcttccccccattcttacatcctatagatttttatcctatgtatttcttatctgaccctctctcttcaatgttttctatccttcctgcgagtgcagtagttcaggttctctttctcttggaggtgtgatgactagcttctcatctgacttctcagcctctaatcttgccactgttaaattctgctcctcaaattcctccattattgtgttcttgacagcatgcaaattgaatcgtgtcatttgtttcaagagttttcattgactttacttataggttaatttcaactttctttatatggtatagaagcccacacatttttttgttttgttttgttttagagaggatctcactctcttgcccaggctggagtgtagtggtgtgatcatagctcactgcagcctccacctcatgggttcaaaatgtccttctgcctcagcctcccaagtagctgggactaaaggcatgtgccaccacacctggctaattgtgtgggtttttttttctttctttctttagagatggaggactcactgtgttttctaggctggtgcccacacattttaatgcctttcagagcattccctttttttttctttttttttttttttggtgcttcctaatcccatgcccctatcacatcagacttaatctattttctataatgtcttccttcacccactcctacaaatctgaattttttttttccttcagtgagtctgatcttagttacatgtgagaaatgtagtcctactaaatcagaaatggactatactacctcttagaataacatctcttgaaagggatcccctatagctttaaggggcctgctggttttttgttaacatgggtgaattgtatagtggtaaaatctgagattttagtgcacccatcacctagtaatgtaggttataactacatattgtagtagttacaatatattgttttttgtccctcactcccctctcactctgccctcttctgagtctccagtgtctgttatactactctgtatgcctttgcatacccatagcttagctcccacttataagtgagaacatagggtatttggttttacattcctgagtcacttcacttagaataatggtcttcatttccaaggacacctttgttgttgttgttgttgttgttgttgttgttgttgttgcgacggagtctcgctctgtcgcccaggctggagtgcagtggcgcgatctcggctcactgcaacctccacctcctgggttcaaacgattcttctgcctcagcctccctagtagctgggactacaggtgcccgccaccacacctggctaatttttgtatttttagtagagacagggtttcaccatgttggccaggatggtcttgatttcctgacctcgtgatccacctgcctcggcctcccaaagtgctgggattacaggcttgagccaccatgcccagccccaaggacacatttttaaactaagaaaatgttcagtttgttagaatttaatgtggcatagggaaaggaaaatgaattttagaggaccagtcttttacaaaagattactgcaaattttggtggtttcgttcaaaaacgtaaaaaagatcaatttcttttttcataatggtagttgctggacccttgtattggtgtggccattggagattacagaagccttttgttactggaaataattttcaggcctcagagttgtaagtcaagaattgcctatactgaaccctttggagtcttttcattgttacgaggtaactttgcttatgtgtgaattaatgcttaggctttcaaagcaagaaaaactagacatgatatgaactttgtcattctgctaagttaatactgaaatgaaaacttttactgatacaaagacatttctgttaccagtaaattgtgtagactttgtgaggattttgagatgtgatttatattggcttattttttaaaaagctggcttaaaaagtgaccacaagtgtgctaaaaggtttatttgaggtaaccacagtattatagttcccctggcataattattccgtattttgtttccatgagtcaaggcacaaagcaaggataatcataatgattgtaggaaacagcgcttagagctgggatcctaggattttaatactaggatcttttacttgttgcagcttccacattcctttttgaaaagctttttttaaacaatattttttagggcacaggcgaactattttagcagaatgaagcagtaatttaagaaaaatctttatattcctgtccatttccacattctttctgaaaggctactcttgggggtagaaatacagctgtggatgaaaagattgaggtaaggaatacttttctcttaaattcttgtagcttgggtcattaactattgtcatatatgtcgacctagttcatggcagccagaggagacaaggtataaaattgactgggttgtgattcagagggggaaacaatggaaaatatattgaacacttttacattactgagaccccttctacacttttttcctctttggttttagactgtataaagtattgtgttggtactgtagatacagcgtgtggctattgatattgatataagaaaatctgttaaggttcctctttcagcagttatggggatcttcattcagagcaataagatcatttctcctaggtgttacatgttggcagactgaagaagacaaagacgtcttgtcttcacattgttttatggccacgactttgaattcatttgatcacttaagaggtatcgcagacactgtagctaattagaaggaagggggcagttttattgtgaatatgttcagtgaagaagatagcagtgtttgtattgcacaggctgtatgaacgtgtattttgttggggagagagagactgagaatctggattcttgggttaaagtttctaccttgctgctggcactttgtccttaaccaagttattgctgctctttgaccctcagtttctgtgattgtaccagaatgcagatgttgtattcttctaacactgtgaagatgttatacatgctggagtacttaaaattccctcttccttaaaattgagaaaaaaaagtagattaaaaaaactaggaactacctggactttgataatattaatattttagataaaccagcactgaagtatgtgatacctacaaagaacaacacctcaagagtttctgctttgtggtaatgactcactttggtaaaattatgctgtgcacatggttattagactactgtagataccagtgggtacattagattgaaaaacgtaaatgaagtggtcttatgtatacaattttttgcagttgccttttgttgggaagagattaatatgagatagtgtaacttttttgtttggggtgggcgggggtgggcatgcctattggtggtgatctgaggattgtaactttagatcttttacattgaaattatagaaatttgattgttatggataattcatggtgaaggaatgtaatgaaattattattattattatttttaatgactaacccatgttcctagatgtattcatttttggcttagctctcctctcctctcctctcctgtcctctctctttctttcttttatttttttttagagagggggtcttgctttgtcactcaggttgaagtgcagtggtacaatctcactgcagtctgaacctcctggctcaagcaatcctcccgtttcagtcccctaagcagctggtactacaggtatgcaccaccatgcccggctgtttttgtattttcgggggaggcagggtttttccatgtttcccaggcttgtctcaaactcctgagctcagagaatctacctgccatggcctcccaaagtgcttggattacaggtgtaagccactgtacctggcctgcttttcagtttttcagtaagtaaattgtgaggcatatatgttgattcttctggctttggaaaatccttccctataccctatttatgtagactgaatgaaattgataagatacagtattttcttcctagactgttcaacactggcgtgaaatggttcttgtgtaggactccttgccctcttccaggtagctctctttattcagtacatgttttacatgcattctctgtgtttcaaacctgagagatgtcagaggaatataagagatggtccctattttccagggcttcacctctgggttaattactttgggacagtttaaagtaaataaactgtaaaaaaatactcttggaaaagttggtgaatgatacgtgcttaatttttcactaatctccctcgtggtttttataatgccatgtgtttttcttgggagggtttccttacagctgtatttgtgatcttgggctagaatttatgagctgccaccatgaaggtctgcctctggctttggcatcagagatggcgagttgtgtggtttgttttcttattgttaatgtgagaatttttcctaatcaaaataaatgcctatgtgtttttcctgactttcttgttggattgactaaggaagttgtgtgaattataaaaatttcttcctgaaatgaaggacaaaatttccaaagcaggatgcattgagattgtctgaagaaatgtatgtcttctggttttagtatttagacttgaagtttttttttttttttttttttttttaaccgtaataactaggaaaagtagaaaagttaaaagaaacaaaaaacatcacggtgggaaatagaaggagaaaaccagacatttatgaaaaccattctggatctcacagatgctattaagattagtaaacgttggccgagcatggtggctcacgcctgtaattccagcactttgagaggcagaggcaggcagatcacctgaggtcagaagtttgagaccagcctggccaacatggtaaaactccccatctctactaaaaaatacaaaaattagccaggcttggtggtgtgtgcctataatcccagctacttgggaggcctaggcaggagaattgcttgaacccaggaggcagtgagccgagatcacaccactgcactgtagcctgtgcaacagagcgagactctgtctttaaaaaaaaaaaaaaaaaaaaaggccgggcatggtaggtcatgcctgtaatcccagcattttgggaggctgaggcaggcagatcacctgagggcaggagtttgagaccagcctgaccattatggagaaaccccgtctctactaaaaatacaaaattagtgggcatggtggcacatgcctgtaatcccagctgcttgggaggctgaggcaggagaatctcttgaacctgggaggcagaggttgcagtgagccgagatcacgccattgcactccagcctgggcaacaagagtgaaactctgtctcaaaaaaagaaaaaagaaaaaaaaattagtaaatgttgactagtctcagggatatttgagctgcactcagtaggctactttgcatttgtaaaattctcacacatcaaattgcatcatctttggctttttgatttcatgcacgcagtctgtgaaaggctaagccaggtatgtggttacatataaacttactaccaactagcgctgtcctttttctactccttaagaggtttattggggcaataaactgttggcattattactcacctagcataagctgatcctttctttgactgtttttaaggaagatgttgttttatctgctaaaacaggtagcacgagattgacttcaccaaagcctcttctaagactttagaaatggcttaagcttcgctgctttcttagcacttttactgtataggccctggtatgtggtattgatacatacagtaagtataaatgtgagaagagaaaccacattttcatgctcttaagtgatccatgctgttttcacttctcagggtgatttttggttgtagccaactcagaaactctcaatttaatttgagattgtgtgaattgctttcctagtctgtacaccagaaagaatgcttctctccttacacatttcgacacttcttagtgaagatcatttacttatagagtgtatgcattatattagcatatggcctgggtaacttcagacttgttaacatagcgtgggaaaggttactgaaagcatgaggaggcagtatattatctctcagttgattttgtacaccattttgaatattttctgtacattccctttcctctagtgttggtttcttatacttatagtaaagggaaactgatgttgatattgttcaaaaaagaaatgaagtgaatttttgtatttttaaagaataaattaacatgctttaaagtgcttaaccagttgttacaatatcagttatcacagattggtatgcgttggtccatgttatgtatttgcctgaatcaaccctaagactggttggcttatttctgccttttcttttccaaaaggtatacttgacatgaagtagactgtgcctgtttgattttaagttttgaatatggtgggaggtatagattaaagttaatttcttttgcatatggatattcaatttttctgaaggcatttttgaaaaagctgtccattctccacctttgcattgcctttgtacttttgtaaacaatcagttgtccatgtatgtgtgagtttatttctatactctctattctgttcctttgatctatttgtctatctttatgcctatactatactgtctttattactgtagcttgctttgtagtaagttttgaagtgagataatgttacatagttttggctttttaagattcttttcactagcgtatgacttttagaatcagcttgtcaggttctataaagaatctggccaagatgttggttgagattatattgatcgtgtgatcaatttggggagaattgacagtttaaaatattgagttttcaactctcgaacaaggtctatctctctatttagatcttacttatttccttcagcaatattttgtacttttcagtatataagcctttcatatattttgtcagatttattcctatgtgtttcatatttttgatgcagtattaaatggtggtgttttttaactttagtttccagttcactatcaatatgtagaaattcactgatttttgtatattcacttgcattctgcaaccttgctaaactcacttattagttctagtagttttttttgtaggtcttactggattttctacatggatgatcatatttttagtgaatagaagcagcttatttctttcctcctaatctgggtatcttctctgtctttttcttgtctgatttctctgtcaggaacttacaggatcatgtttaatagaagagacaagactggacactcctgcccttttcctgattttagggggaaagacagaatcttttgccattaattctgagcttagctatacgtttttcatagtgccctttattaggttgagaatgttccattctaagtttgtcagaattttaatcaagaatgcatgttatattttgtcaaacaccttttttttgtctatcaagatgatcatatgatttttctttttttgtttattaatatagtaatacattgattggtttttaaatgtgaaaccaaaatgctttccttggtaaactctatttagtcatgatatattaacttctaaatagattgttggatttgatttgttaaaaatgttttaaagaatttttacacctgtgttcatgaataaaaattggtctgtagttttcttttgatctatttgtctggttttattatcagagtgatgctggcctcataggaaaggtagggaaatattcccttttcctcagtttcttagaagagtttgtgtagaattgttattatttcttttgtcttttcttttctttctttctttcttttcttttttttttttctttttttgagacagagttttgctcttgttgcccaggctgaagtgcaatggcgcaaactcagctcactgcaacctctgcttcctgggttcaagcgattctcctacctcagcctcctgagtagctgggattataggcatgcgccaccacgcccagctaattttgtatttttagtagagatgaggtttctccctgttggtcaggctggtctcaaactcctgacctcaggtgatccgtctgcctctgcctcccaaagtgctgggattacaggcatgagccaccaggcccggcctgttatttctttcttaaatgataggtagaatttgtcagtgaatccatctgggcctagagttttctttctgtggaaaggttttaaatgaaatattcatgttctttactaaatattgaactatttatgttatccatttcttcttgagtcagctttggtaatttatgtcttttcaaggaattttttcattttatcaaagttgttgaatttattggcataaaattcatataatattccttcattatccttttatatctatagaatctatggcaattctatatctgttgatagcctcctttcctcccctcttctctctctgtcatatcagtatgactgggagtttattaattttattgatcttcttgaagaacaagctttattttcattgatttttctctgttgttttatatttcattgatttccttctttctgcttactttagttttactttgcttatttttctggcttttaaaagtaggagctgagtttgttgatttaagatctttcttctcttctaatatagccttttgatgctataaatttacccccaaatattactttagcagcaccccaaatattctgatctgtggtattttcattttcattcagtttagagtactttctgatttcccttgtgacttctaattgaaacactccaaatattttaggggttttccagggatctttctagtattggtttattacattaaatcagtcaattaattaattaagagacaggatctcaccctgtcatccaggctggagtgcagtggcgtgatcatagctcattgcacccttgaattcctggtttcaagtgatcctctcatatcagcctggcttttaaaaatcttttgtagagatagtgtcttactatgttgcccagcatggtcttgaatccttgctctcaagcagttttccctccttggcctcccaaagtgttgggataacaggtatgagctactgaacctggcctggaattggtttcttatttaactccattgtgatttaagacagacaaacactttaactgggtatggtggtgcgcctatagtcccagctgcttaggagatggaggtaggaggatcacttgagctagtagctgagtttagcctgggcaacatagtgagaccttgtctctctaaaaacaaaaaacaaaacacacctagaaacaacattgcttgtatgacttgtatccttttaaatttattggcacaattttatggcccagaatatggtctttctttgtagatgttccctgagcacttgagaggaacgtaattttcttctgtagttggtaggaatgttctataaatgccagtcagcccaagttggtttatagtgttgctcagttttattatatccttacggattttttgcctgcttgttctatcaagagaggtatattgatgtctctggctataattgtggttttgtttctttgttcctattgtcctgtgctattttgaggctttgttatttggtacataaacatttagggttatgtggtattgattgattgatccctttattattatgagatgaccacctctatccctggtaatagtctttgctctgaaatctatctgtctgtctgtctgtctatctatctatctatctatctatctatctatctatctatctatctgcctgcctacctacctacctatatctgtcagtcatgtatctcactttattatctcttttaattggagtattttccattcaaatgttaggtttgagactttcatgttgccatttgttttttgttagtcgcattttttttccttaccctctttccctgcagccttgagaatgaataaagtatttaagatttcattttatgtcttttgttcccatattagctacaattattttcctcttttttttgtggttgcattagggaaatactatatatacactatatataataaagatatataaatatatataaaatatatataaagatatataagatatatagtatatataagatatatcatgtatatatagtatatacatataaagatatatataaagatatgtaagatatatagcatatataatatatagtatatatctatcatatctttatatatataaagatatataacatatatattatatatatacagtattttccctaaagcaccacgaaaaacaaggaaataaaaaattgtagctaataagggagcaaaagagataaaatgatatgttaaatactttattcgtccacaaggccgcaagaaagagggtaaggaaaaaaatgcaactaatgaaaaacaaatggcaacatgaaagtctcaaacttaacatttgaatggaaaatactccaatatatttatatatatatatatatatacatactatatatatctttaatttacagtggtctaccttcacatgatgttatatcacttcatgaataatacaagaatattatatttactcttctatttacttacatttacgcctttatagcctttatactgtcgatgacatgagttttacttttgtatttgttaaaaaggctacaaaacattgttactatttctgcttaaacagtgaattatcttttaaggatattttaaataattaaaaaaaaaatcttgtatatatccccatgttttcacaggatccttagggtgtcacttcgtcagccagaaacctctgtggccagcgttgcctctgcttcagtttttctcattcctgctgggctcattccacccactctgcccgacaggctgcgctcagcttgtgctaccaacctcggtcctacgccaagggtgagccacatgcagagtggcaaggattgtgtgagcaagtgagcgcagggtctggccactgcacacagccaggcttaacggctgctgcagtggggagggcagctccaggtgcccgcacaggtaccggccccatgtgaggctgtggctggaccagatgtaccacaagtggcttccactgtgggcaccaatgtctctggatgaggggaatgcagtggcacctgaaagtgcagagaccgccaggaaccacagagccccaaagaggggtattaccgggctacctgaagggctgcaggtcttctctccttttcattgcctgtggtggtggggtgttatcccatttgtgttacagctgtcttagtcttgccatctggcaggtcccaagttcttgtctcacatccaggaagaatgggttatgtggacaattgtagggtgatcaaggcagaaaggaactttattgagtgacagaccagctctcagtggagacctgaagtgagtagctcctatctgcaggcaggtagtcccagtgagtccctgagtctggctgagtccagggtttttatgggctcagaatttaggaagtgtgtgctgattggtccatgggcagccatgggtgggcctggaaaaagcaccattctagtggccaaaaggcatcaaggaacttctcactcggggttatggactccactcagaactggcagcccagcccacagacttcatgccatccctgccttgaaggtgggatttcactgcggacccaccctttcctgccttgggacctgtctgcctcctgccgtgatcaacatgctgtccacagtaaggctgtctgtgccaggaggcacctgcaggcctatactgagctgccctcagcagctccagcctccctcctgtgcttacacccaatgtctggaggggcctgaggtagcagggggctggtataccagcatgaccctgagtgtgcacatatgccgctaagtcataacagtgcccagattggccacaactttgctccatgctgcattaggcaccgagagagcagggagaggccagagaagcaggagcaggcacttctgagcctgcagggcttcccgagcccccaagaacacatggatgcttgggtctgtagccacatctaggcagctgcagctgcagctgcacctgggagtgtgggttcctgtcccgccaactctgtaaggtgcagggctcctgctaggatcacctgttcctggcccttgctggttctaagtgaacaggccttccccactgcagcgggtgtcctcgcagtggccaatccagacgggccaccattgccaccatcaatgtggttaccatttcttatgcccttcatttctctgggtagatcctatttacatctgagcgtttttcttttgcctgaaggccttcttttaacatttcttactgagagaatttactgatgatgaaatcattcagcttttgtatgcctgaaaacatcttcactttgcctttgttttcaaaatttttttctgggaatataattttagttggacagttactttttcttttagtaatttaaaagtgttgctctactgttttctcttagtgtttgccatgacaaaatttgtgtcactcttagtttctggtaatgtaacttgtctttttttttgactgcttttaagtgttttctctctagtgctgcttttgagcatttggttacattgtgccttaccctagtttccttcatgtttcttgtgctttaggtttgttgagcttctttgatctaggattcatcatttttatgaagtttggaaattttgggttattatttctttaaggttttttccccttctcttctgctttaccttttcagggactccaattaaccagatactagatagtttgaactcttcctagagtttcctgtgctactttgatttttcttcattcttttttctctttgcatttcagtttggatagttgctgtgtctcaggttcaccagtcttttcttctgctatgtcaaatctgttgttagtcctattcaatgtgtttttcatctccgacagcagtttcatttctaaagatttggttacagtgtttttaaaaatacttacaagtctctatttaactgtttgaacttttggaatacaggtacaatgattgtttcagtgtccttgtttgcaattaacctcagtgccacttctgggttgttttcactttattgattattctactcattatgggtcatgcttttctgcctcattgtgtaactggtgatctttggatgccagacattgtgaattttaccttgttggatgctaggtattttggtatttctataagtcgccttgagctttgttctgggatgcagtaaagttacttagaaaaactttgatcacctggagttttgttattggcatttgttaagggaaatctggaaaagagcttagtctaggccttggttattcctcattacttttgcaagacctttttgagtattcaatctaatcatctgtgaagtatgagttttttagtctctctcatgggaacaggcactgttcagagtcctgtgcgagtcccaagaaatgttctctataattcttttgggtgtttctttccccagccttgagtagcgtccccctgctttcgagccagtctgtactgtgttgcaggtgaaccctctgtagatctccagggctctctctctgtgtaattctcttctctctagtcctctatcctatgaaccccagctgccttgatgtcctcagactcaactctgtctcctcaattcatcgagttggcctggttctgccccagtttcatctcctggtattgcaccctggaaactctccagacaataaggtgggtcagttatagggctctcatttgtttcctgcatctcagagattactgtcattagttacttcatgtctggtatcttgaaaaccattgttcatatatttttctgagtattttttgttgtttcaggcaggagactgtatctagtcactgtttctccatcttgaccagaagtggttctcccatatttcatttaacaacatcatgaaatctctttcagccaagctcaagaccataatttgtccttctctgccttctcttttgacccaatgccttgttctttcagtcttgtcagttcttacttcctagtatatttgacattcttttgtacttaatggtaaaaatctttaggtaaacatcatcattattaacttacactaaaaaatagtaaaatcattggaatggagggaatattgtcagaatagttataagttttggtgccctatcccagtgccatctttaaggtgagtattcagggaatatttcttatacatcttaattcagtgtaaaatttgcatgttttatatgttgatagagcagaattatttcaggatgagtatatttgtttagatcttttaaaaaatgtatctttagggaggtttgtgcttttccagactgagccagaatgctcgtactgcattttggatttacacacacacacacacacacacacacacacacacactacttttttactttccagtttcccctgttacttggtgtgctgcttgaaaccagacttgccattcttacatctccagaacctcataccatgcctggcatagtggcactcaattaaggtctgatgatttgtactgagtaagctatagttttaggcttggagcattgttaaggctttgcatagaatctctgcattatacagaatcttaactgtctctacattacagtataatccacatctgcatctttgcagcttgctattatacatctttggtttgctgtgaaagagctgtcagagaatgagctctttattgcttagaattactagttaactattgttttgccattgatcagaatgtctcctttttctgttctgctgtattcattgtggtattttgttgtaatcagagatagtcttggaggtgcaagacttattggatctccgtttgtgccattgtcgcaacatcactgacttggtgaggatcagtcaggggtttcttccttctgtttttgtcatggcagtcttactttttgaaacatttgtcaccttctctgatcctgcctcctgcttttccccatctgcactctgacctatactgttttagaaggaaaagataataaaggtcagattttataaaactctgttcaagaaatactgcataaagggctcttcaagataaaagactaccccgcttgtcaggcagcctgctaatttgagagtgctgacgacttaccttgatgaggcaatcttcgaattgatgactctttttaattaattgtcttttcattgataaaacagaattgctttgttttccttttactgcccatctcttcctcacaaaatatgtttcctctccgaacacacaaactgtgttttcagaatctcccctgagtctggaggtctggacagtagtgtgtttgtgtgcttgtgtgtgtatatgtgtgcacacacatgcacagcttgtgtgcatggtatctgtgatttctgtgtgtgcttatatttttcactattttggattcatccagttctataaagacatacttgcttgctttgcatggttctggctccctctgcagccccaaatggaaaagtgctttgttgtcttttgttgctgaaaaatccagctctcggccttctttctttgagtagagcatcccagctggtatacaagtatagattggatttcagatttagcaatgcattgtgttttgacaaagcttattgaagatggaagtcatttttcaggagcgctctaagaggtgagaaaatggcaagggagggtggggaggaaagggagaaaatgcagaagaggcagacacaattgcaacattgatttggtaaatagaaagttaatgtagctacaggtattgacagtaaactttggctaagatattggagaattgcagattggaaggctagagctatttcagaatttccagggccattttattggattatacaccttagaaccttaacacacagcttctgttgattagtacagtttggcctccagtgtgagtttggctttgaacactcagtgtgactttggctagggcttggcacctgtggacttcagcttctactttagtaaaatgaatgagttagaacaaataattgttacattcaaatccagatttatgagtgtacgatagtggcttcacattatttgttttaagttaccgttgagaatttggttctcagtaatctagagctactattttagcagaattatacatgggatgcagaatagaagcttttaagcaacagtcaaccagattggtctataataactccaggataaatacaagaagaatttctggacacattttgccccagtgaagtaaaattatttacattcaaggatggatttggaaatgcaggtatttttctgttgatctgcacgttggttacactggtgtgttcagtgtgtaattacacttccatgcagttatttttgtttttgtgttagatttcaataaactattattttttctaacagatcttaaactttaatgcttctttagagtactaatcaaagtactgttacataagtaatggctcatgtgtgcgcacaggtgtctgctctgtgaagtagtccatttcaaattataccacattaaattgtgtctgctttaaagggttaaaataagtacatgtatatatttagatatataagatgacttctatttaatagataattagaatgtttatgtaatagatttatgctttcagagatttcatattcacaaagtaagttttggaaccttgaaacatggataggtcagtgtcatttggtttcttttttcttcgtttaatccttttcaggacttcggctccctgtgagttgttaatgtatagtgtttatgaatccaaataacattcattaactttcttggaaggtcacagttatgttggttctgttcgaaataagtactataaattttttagaataaaaaaggaaagtattacagtgagttttgctatccacttgccactttcctttcccttcctttttttgttttttgttttttgttttttggtagggagggaggtctccctgtgttgtttaggttggtctcaaactcttggcctcaagcagtcctcccacctcagcctcccaaaatgttgggattacaggtgtgagccattgcacttggccctttcccatttttgtgcttgactagtataagtgtcatttttgttttcttgaaacctttgttctttcccatgtgaatacacataggatgacaatagtcacaaaactctttccgtacttagaagactaaaaccagaaattgttgcttgaacatgtaatggataattgttaaaattctgcactggtttgtactgttctcgaatttttatgtaaaggtctagtttagagatttattatttttattgtttagacttaaaaggaaaacagttagctgcggaatctagtttttatcctggagcgaaactcatataaccttgttgattttagtgggaattagaaagttcagactctttttttagaggtctcccaaaattgtttccactctatgttgaaaggaactctaatctacagaagtggaggtgacagtaaggagggcaggggatgctcttcccaaaggagtttctacaatgcagctgagttagagtgcagtagaaagagcgagatctcatagtggcatgttcctgtcacagcatgtgtatagcagtcacagactctgaacccaaagactgtatttctagttggagcagacattgactcctttttctgggctgaaaacagtgaagtgtattggttttggtagcttgggttataagaaacctaaattagtttgaagtggaattatcctgatgaaagggcagttgaaagcccttgacactggacagaggattgtctagtgtctaatcttggctcaaaatgcaccagacataatgagagtcattatgaactgctgatctcctacccctcccctcagcagaccctattagacttgcaaaaatagcaaacactgtgtgtgtttggcatggtgcctgctgtgtagtagaggaagaaagcgtaccttgtttgcaccacaaccagatactggtgcatcatgttacagctctgcttggttctgagctcctctgttcaatctcgtcttgacagatgctgtcgttgccaccccttagcaagacaaatgcagccactctgcaggagttggcttttgcccagctgtgcttgccagggccccaaactgatgtgcgtgtgtacctgtggaaaggtaacaggctgtgggtgtgttatcctctgccattatgtgcattaccttttgagtttttgccattcccgaaggaaaagttacggttttgtttgttcagataaatctgaaccctcaatttctcttactgcttttttcacaacagatgttgttaggcacccactaaagatccccaggaagggtccctgccccatataagctcactttctctgtaggtagaaagaaatgcaaacagtcacataatcacaaccttaatagctatgtgtataaaggactctgggaaaaaaggacggaggggatctttggaggtgcatgccaggagagagttgtctcatacgagctatgaaggttaagtattgcttaggaggtgtagatatatgtgttgccagggtccaaggtgaaaaaggagaagtggtttgaaatgagcttggtgaacctaggtttgggcctggttttgaaggctactggcaatagggaatcatcatagaattttaaactaggtgagtagccttttcaaaatttttttaggaagcattattctggtttcagtctggagaataagattatataaaaagtgctgagagttggaaaagtgccagcctattatgttgggagaaggaagcatggagaggttttagatgtgaccattagttcagatagagtagtgaagggagataggacttaaccaacaggaagagaaattaaagagagtaagaaaggaaggtctaaggttttcagctaatactccccaggcatagtatttatagggaaacagggaaggtagatttcagtttggggcagactggatttaaaatacctgcggaatatgtaggtattaatgagtaaatttcagtgtgaagtttgtacccagagttgagaatagagcaggctgggcacatagggttctgggataattgatgttacaaattagagtctggtttagcggttagagccatgagaccctctaatccaagtttgatgtcccatggcagtttgatgcaggatgggaccaacattatagacctactgttacctgctaaaaaaggcatttagtatatttcactcctgagtccagaaagccatttaccaagagcatatctgaatttgtgcggcagggaataatataacaatgagttctgtgtattcacaatttaggaattaatttcacaagaccacaggttggaaattcttgtcctctaatgggattgagcctttgtggaaagagtgtcacctgtattttcctcatctcagtagatgaagtagttactgtttctttcccacattcagccaatagcatacattttgtagaaagcaactaaagtttttcctccaaagctttaggcctcttctctttcagttcctcttggtaagacctggcctgtattggtcagtctgcctgttctttctacttggcttacaccatctgcccattgggacctacagattttttttgttttgttttgttttgtttttgagacagagtctctctctgtcgcccaggctggagtgcagtggcgtgatctcggctcattgcaagctccacctcctgggttcacgccattctcctgcctcagcctcccgagtagctgggactacaggtgcccgccaccacacccggctaattttttgtatttttggtagagatggggtttcaccctgttagccaggatggtctcgatctcctgacctcgtaatccaccagcctaggcctcccaaagtgctgggattacaggcgtgagccactgtgcctggctgggacatacagatattttttggctgcttataagtttttgttctcctaggggatttctgggacacttaaatatgattatatccatcagtgaatgaacaatccatagagttgacatcagtggtaaatacagtaatgtgagagtctaaaacgtgagccaaagttccatttaaaagatctaaatgcaaattatctcactaaacttgagaattattgatcatctctgtccctttctcctttttctctcccttttctttccgtcgttcctccctctcttttccctttaccctcttctcttcctttccccgctccctgttctctcttctctttcccccttttttcttcccctccatcttactttcccttctctctcttctcatttgatataactgacagatttgagcagaactgtgaggctcttaggagctgtgtgtgatgtggagtggccagatgactttatgtgagtatgcacgagggactgtaaagaggctgtccagaggccagcctccctccaggttgttcctaaccctggagagtcatcatatgttatttctcatctcagactgccacagaattgaggagggagattgaaggcagctcattaaaccactttggccacagataagagtgttaagagattaagaagtagatttatctgggggaggggtttggtcccggatgaagccttttcctgccgtcggaaaccaaagatttccttgtctcttttgttctgatccatggaatggtgtggcttagctgcctctaaatctgttttggcaaggttgtttgtaaggagacatggcagggtctgtctggagggaacagaaaagagagtacatattgaatgtagatgcttgaaactagatcatagtttacctaattgcagaccttgaagaaactcttggggccacttggatgggggtgcttctggaagtttgtctctgggggtatgtgagtatggacctcttccacactgagaagagggcagagcccagtcatcagttttcatgtccctgagtacaatattaggcttctttttattattatcattatttcaactggtaacaatgtttcccctcaggaaatgtctttacctctctgaagagaagaccgtgatgccagctgttagtttgagaaatgctgcagggtcctctcctacctgctgtttctgtgctctttccatgtgttgtggtgaagcccctacctctccagccatggggccttgttcttcatcatttgttcctatcttcagtttgggatgtggcaaggagaggcagagtgcactagagaaatctgatactgtaatgtgctaggagacagcatgatgagaggttttgggtgggaagtccatgctaaacatcttaaatgcttcagaaacttctttacagaattctctgcctttaggattctcctgttcaataaatatatttttcaccactttagaaataatcttcttaaagcccttccttgaactcatgcatctgtaatgactgcccatgaccagcagtactacattgtggaatgcaagacctaattagtctaagcatgaaagaccttttagtttcatcagctaagcccccttgtcctcccaggcattcctctttccaggtgctgtctccttctgcagcttcccgtaggcctcttcccactgctctttctgctcttctataaaactccacatttaatgcctacaccttaccaaactccaggaaacttccttgactcttgcgggctatatggatctctacttattttagtttttgctgttgcaggaggaaagtatgatttttaaaatacaataatccttttgtatgtctacagaagaatgtggtttggtgagttttacatttgatgcatgattgtatccaccattgtgagattataaataaatctcaagacatgaccttgccctgaacccaaaactaaacatgaatgaaactatagaaataactggataacctctggtacatagagggtcggtgttacagggagataagcagtacaccctaacctagggaagtgcaatgagcagagaggggatggagtatgtaggtggagaagtggctaagtgtcttagatagacaaggtggaaccaaagtacatagagcctggaagctgcagaaaagaacgtaggctaagaaacaagatcaattataggtggttgagtaggtgagtaagacagaaatgtgtgaggtgattggaagggactgctacgataagccagctgtgcttacaatggtgaagataaggaatggtgacttgggaagatgtattggagaaaaatgatagggcctgctgactgagcagctcaagctttatgggaactgctgatcatgtttttaactgctatagatatatttgatttaagtaaatcaatttgtaaagatttagatttcataatgatatcttagaccatatttgcacagcaagtgaaacttaaatactcttgtatccctatcacatcatgttatctttaacatgtgtatcaactttcttacctataaatgctggtgacacctcccagttttctaggcttaatttgtagagggctcaacatgtgaacaatgaatttggtgcaccattcaagaagtaaaattcaatcatttttttctcctattcatttctaaggataggaatctttgccttatagaaatattttaaaggagcccccttaaatgtcacactctctttaggcttaaactattcttatttccaaaatgtaacatcagaagttcagaaattctttctacttaggttctctgtgccccacacaacctcacatttttgcctgagtctccccagtcttgctgcaggagctggggtagcttcagcccacttacatcctgccaggggataaacttgataccttttgctttcatgaaacactatctgtgtgaagtgagctctttgatccacagtcttttatgctgaagctaagggaggattaaggaacacctctgagttgatgaatatttgatgaggtttatataatttaaaattacactcttgttaaccctttcactcaatggagagagaagagaaacttgtataatcgtggttcctacttaggcataaggtactgtgtcttctctgggtgcatcctccttatctatgtagagcagagcatgggaacttagtaaatgtcaattgatgattggcattttttacagcttcatagagagaaatatctctttgcttcattataaccatactgagtgagatgctgaagtggaattgggatcacacagtatctgtgtatttgacattgcatgtataatggtgaacaaggcagatattccactcatcataacaacaacagtagtaatcataccaccaggaagcattctttcagtgcttactgtatgcaaggctctattctaaactcttttcatccattttaattcttagaacaaacttataaggtagatgctattattatcatttctattttataggtaacacaacccaggcacaaagagactaactcccacaaggtttcacaacttacaaatagcagagtcaggatttgaacctgggcaggcagttctcagagcctgcgttcctaacttctggctggacccctcatggtgagaagggcagagagttgacaaatcctctgaagtatggtgagttctgtaggagtctgcaacagggcgaattaacctagggaagaggaaggctgggaaggctttcctgagaaaatgtcttttgggatgaaacatgaaggatgagtaggtgctctctaggtgagggctcatggacaaaactattccaacatgtgtagtggccacaggctggacagaataaaataggtgatttggaggaacaacagagagaagcccattaggggtagagaaagtgagagagtgtgtgtcatggagtgatgccacaggggccaaatcatgaagtcctccgtaggtcccacttccaggatgtgggtcatggaaatataaagggctaaggacaaacggagcattcaaggggtagaaccatgggtataacatgatgagatgtaagctttaacgtgtttctcactagtgatgtgtctaagtcatagagggagacagtagaggacaagagtgcagtcaggcagctgatgctgtaatccaggtgaaggaggatggcagcctggaccaaggtagtagaggtaaggatggatagaagcttaggagcttattaggatgcagataataggagttctggatgtgggagatgagggtgagggaggaaccagtaacaatgcctatgttaacagtcagaagaaggttacaatgtaaccagactggaacatgaacaaattatctgcagtggagcttatttgctcaaaagaaggatcctgcaagagaacatggatggcttgtgtcatccaaatatggatggctttgcccagttagagaataattcctgctgagagaatacacatgcacgcaagcatgtacacacgcacacacatttgttgtagagggttataccctcccaagttaaggtaatttcataattgaggtcgaccctctcgatgtggtaccattgataagccccagcactacagttcagctaccaacactgagtttctcattgagtcaaagcgtgggatgatctgacagcgtcagcagcactgcacaacagtgggagggacggatgaatgccacatctataaggaattgccacttggattcaagaggaaaaggggtaattatccacatgggtaacaatttcagtttcatttctcccttgagctaactctattcacctcaaacgtctttcctgtctagagaaccaccaaaagtgtcattctgattaccatttgtaactaggtgttttctgcttaacatttggaactgggtggggtgagataaattccaagaagatgggaagtttttatattgcagtttatactacagcagcagctccagtctgccctacagaccttctagattttttttttttttttggctgtgtgacaggtgcctgtggagtttatattttgatatttgatcaaactttttaaacctgagcttgtagtaaccattatagtcgtcatgcttgagaatgtgtatttgctagtagtatagagttaacctcagtttatgggggcagggattactttgtgaggaattaaatgtggtgtttgaaaaactgggaagtgaagatcttctgcaacacaggagtttctaaaggaaaaacaattgggccagactggatgaactggttagattaaatgctatcttcctgactcagggttattatttttggttgcttattttatttttaattgttgaagatttattgtaccatgctttgctcaggacagtgtgtaaggtatttagggaaagacctgaaagagacaggaagcatgagcccttccatcaggcacctgaataactgatggtggacatattgagaatacgtagaaaatttgtatcttatggtcatattgcacttcagacttttcacaatgcccttgtatctctgttacttgattctagttttcttggctcagcatgcacagttgttttctttacttgtttatggtctgtctctcccacttaaatatcaggtccttgagagcagatacttgttctcagctacagcccagcacctagatcaatacctgacatattgtgggcactcagtaaatcttaggaggataaatgaacaaaaaacctatcttctgaatatcagtgataatcatataaaacaggcttggtatgctaccatttatgtacttctgattttgtgttttgacaggttttcacctaaggtttgtagtagttggttttcctcagagaagtttttgggctatttttctttttaagaaagggtgagtgatgtcattatgaagttgaagctataggactaatcatatacttgccctgcatctatggtgacttttttttctactggaaagaaagcccgctattaaataattattacttccaggtctgagggagactgtccagcatctgcaagagttttgctaggatgcagggctttgttcccccactgggctgtgattccatccatggagtaagctgcattgtggtagcaagtcatcttgacagtggcaagtatagcatatttcaactggtgatttctgcatgatttgcatgaatttctgtatgacaggagtcacaacaaaactgttacgtgacttgtgtctaaagctatcagtcagctggagctgtgaaaatcagtttgcatgtgtcaacaatttaatcttctaatatgcttgccaatagaaaactgacactagaattatttttctgtatttactgactagaaagatatggttatcaagtgcactgattgaaaaatctttaaattccagtctttaaatcgggaccatatgtgtgttctttccctagccaaatctatttgtgcattcacccacacatgtgtatacatatacacacacagtacagttacattgatatgtgtttgcgttatatatgtatgtattcacacagagcatgcatatgcctcatgcatattcatgagctttaaatgtgcttatagattaagatataaggatgttggggaagtttccctatctgttaactgagaataatactactgcctaccttccaagcaccttgtaagaattaaattagttaatataagtaaagttcttagaacaaggcctggaacatagtatgtttcctataaatattagcttttattattttagagtatgtcttcattctgtcagcttcaaatgggcttcaaaatttagcttcagaggcagtatggcaaagcctcagaattattgcataattcatttgatgaatttactgttattctaaaatgcctgcaaacaatttatatgtcatgcaggaaatattggtatttgtatttctaaatcaaagccatttattaaataccttagtcatattgattcctgttatagtaaattacttctctttctatgtcatcattatctcctagggtctatcagggagatattttcagtgaatttgtctttcattatcagactaaaactaacttcactgaaaacatcttcatttgggatttgaaagagaacaaattttccatttactaagaaaaaaataggtgtttgtgtattggtataaaaataggtatgtatgtaagtgatcaaatagaaaataatgcaaagggacatagaagaatttgggaatggaggtaacatacacctagaaaaacagtgacaagggcacatactattttgaagcaggttttagcaggtaatgatggtactcactgtgggaggaaggtgtgaatcatcagtcaaaacgagtgtacaaactggtgatatgaaatgctgcttaacagttgttttaaataattagatttttgttggggataaatagttcattccagacaaaagtactagggactctatagctcatctaacttcatagattaaaatgaaggcccagataattaaagtgaagacctcagagttagttaatggaagtgcaagtttcaaaaccaggctgcgatgtgggggagacagtgtcctccatgacagctctttaacagatggcatagaaactcgacttgtgaccttgaggggctcacttcagctctctaagaataattccagcccagagctacaccatatatagagtctgtagactattcctaataaaatggttttcttgtcttagagaagagaaactcagcacatacctactttgagtcaggtttgggcatgctcgaaaagggggcagcgtttttagatggagactgctggagtagactcagggtctctttcagcatggctgcctgtgtgatttgattcatgtgcactttaaaaacctgttttatctaagtgtaagactgtagaagacatatatatttagggtattgcattgatttttggaaaccatttgtgtagggtacagtatctttgaatttcactatagtaaccgagttacaaaatgggccactgggtctgctgggctgagaaccatcaaactgaatggtcagcaactttgttcatgcttcatctactttttcttttcaatcatttggggacagataatcttttggtcgctttttagactaactttgagattcagaggggcagtgtattcttggctaaaactttttgtacgaggcacactttcttttaaggtttgtgattttacccttacgtatcagatttcatggtatccaaatgcaaacatgtatttaacagttggtagggatgggagagtttgaggacagcaaagcagcctactttgatgaaagggtcagatagattttaggatctgcaccctttcttagcatcctaagcattttgagaagcagttgtatgtaggtaaaaacaaacaaacaaacaacttggtagttggtgtcagctgaactgctttttactgaatctctgctgtactagctgtgtggctctgaggcttacttccctagtctgcaaagtaaaggtaatgatacctgtttcacaatttaaaaaatagatttattgaaatatatttcacataccataaaattccactaatttaaaatatatagttcagtgattttagtatattcacagagatgcagccatcaccacaagcaattttagaacattttatcacccatgaaagaaatcctgaacccaaaagggccatttcctccctaacttccctaactctaggcaaccactgatctactttctgtctgtgtggattcacctgttttggacatttcatataaatggaattatataatatgttgtgttttatgactgccttcattcacttagcataatgttttcaatattcatgttgtagcatgtatcagtacttcattctcctcaccccccagctttatattaaagtataattggcaaaaaagtacatatttaagatgtataatgtgatgatttgatatatgtatatattgtgaaataattagcataatcaggttaattaaacaccttaatccaaatccattgccttgcatagttaccattttttgttgttgttgtttgtttttttgggtttttttttggtgatgggaacactaagaatctactcttctagtaaatatcaggaatacaatacaacattattaacagtaatcaccgtgactgtacattagatcttgagaaagtacttattttcacaaagtttgtaccctttgatcacatcttcccatttcccttgtccttgcccttggcaaccaccattctactctctgtttttatgagttggatttttttgttttgttttgttttcaagatgggctcttactctgtcacccaggctggagtgctgtggctcacggcagccttgacttcctgggctcaagcaatcttcccacctcagcctcctgagtagctgggattataggctcgtgcccaccatgtctggctggctgattttttattcttatttttattagtgacagggtcacactatattggttaggctggtctcaaactccaggcctcaagtgatcctctcatctctgcctcccaaagtgctgggattataggcgtgagctaccacacacagccgaatttgatttttttgaattctacatgtaaatgagatcatacagtgtttgtatttttatgtctgacttctttcacttagcatatgtcttccaggttcacccaagttgttacaaactgcagggtttccaatggtgtgtagtaaaggggatccttgtatcgtgttgataggaatataaattgggacagcattatggagaaccgtgtagaagttcctcaaaaaattaaatatagaactgccgtaggctttatcaaatctgcttctcagtatatatctaaaggaaatgtagtccatgtctcaaatagctatctgcactaccatgttcattatggcattattcataatagtcaagacgtggaaacaaccttaagtgtccattgatggatgaatggataaagaaaatgtgatgtgatacacacacacacacacacacacacacacacacacacacacacacacacacgcacgcacacagagacaccctctgttatatgtgtgtattgtattatggaatattatttagccataaataatgaagttcactaatttttattgccaaatcatactccattttatgaatatatcacattttgtttatccattcatcagttgatgggcatcatatttttgtgacagtgaaataagacgaagtatataaagtgctttatgatgtcttgaatatagaagcaacgtgtgttttgttgtttcttttcgtctggttggtagatttctggtgaattatcagccgcccctcttgccttgtgaggcaaggaaagcagtcttattgagtagaccatctgtctgccagttctctcatgttagtcctcaactcatggaaaatcctggtgggcactcgtttgatactagaattcacactgcttttttcagcagccagaagtgtttgagtgttaccagcagtgcttgttgtcgttacagatgctccgtacaaaactgtaaatgctgggtttaaagggattgagggagggagccattgcggcttacacagatgtcaactaatctagtgttgatcctcattctgaacctgagcattgacaccaatatcaagctgtggggtagttatgttgtgtgcaaggcttggagggaaatagtgctttggcagttcagtgcttgccgacttcacaaaacacagaaaattgctgagggcttatgtgacagaaagttcatgttacacatatgggcatcttggcgagaaaagccactgatcgtctcagtgtaaggatttggaatttcaaaatcctaaatgattactaaatgacaagtaaaatcttgattgagatagatcgttgctaacgtccaaagagattatctaaaagcattgatttttattttgttggctgtggaaataccgtggaattcatttattaaaagtagtatgtctaagtttctacttattttagatactgtaatataaaattataaacaaggcccaattgttgttacccactaggcagatttttttattatccaagtttctgtttcgggccatgaaacaagttaaaatcaaaactttcgctggttgccattttaaagataaatttgttatataggctttctaagcttggttgccttgctccacaaagacaaaacattaataatagcttacatgtattgagcagtgaatctgtgctaggctttgtgttaaccactgtatatttggattatctcattgatctaaggtaggtacggttgttattcccttcttataggttaggaaactgaggctcagagagattaagtaacttgcccaatgttacacagcttgtaagtggcatttctgtttaaagcttcccattttataaagttttgtgtttttaaatatgctttagaattttaagtttttactctgttattatttcgcgaagtcctatgtctacatacacatcaaagcaattctgtggttcttagggaattatttaataaatgaaatagccatagactgtaattacattatgagtggcatcttttagctgtgcccagcggtagcccagttgctaatctttatcccttgagtagtcaagtagataagaagtggataagcaagtggagtggtggccactcaagcaggcctccaccagaataattccaaataacttcacacagtgaattgcaacccactcaatccacttcactggatagcattgctcaaaagatattcttttactcttttatctaccttgttggcaagcatccccaagaggtcttatgcctgtggcctacagatcaaagatattttctcaaatactgggaactttgctgctagttagaattaagcaaataaaaacatacacctccagaatgtaagcaaactagtttaaaacactccagccattgtattacttatgctttaaaagtttccccacaaaacctcattaatcatataaatattttgacaaacagaaaggggacagagcagacttattattttccatcttgtatgaatggctagacttttcatctgtgctcttatcctaacatgtctttaactcttctgtgctaagatttttatttaaaaacaaggaaattgagactcagtgagatgaactgctttatatcactgtggtaagatgtgttaatagcatttgaaaaggaaaagccaaaattttctttcatttatttatttatttatttatttatttatttatttatttatttattttgagacagagtttcactcttgtcacccaggctggagtgcaatggcatgatcttggctcactgcaacctccacctcccgggttcaagtgattctcttgcctcagcctcccaagtagctgggactacaggcatgtgccaccacacctggctaatttttgtaatttttagtagagattgggtttcaccatgttggccaggctggtctcgagctcctgaccttaagtaatccgcctgccttggcctcccaaaatgctagaattacagacatgagccaccacgcccagcctatttcttgatttttattagtcacctagccttattgtaatttgcacttatctaccattagaacatcataaacccaagtgatgaacagaatggatgtaacttagtgcgtgtatgtaatgcatatgatgtaacatacataaagacaaatggaaaatgcctgcaagatagtttccctgttgtctcatgcctcagcagtaatgaaacatatactgagtgcttattgtgggtcagttactgtgttaaatgtttgtcacgaatcatcccatccagttctcacaatcaacctgtcatgtaggtgctatttttgtccacatttttatagataaggtggctgagacttagaaaaagctaacaccacttgcctgtggtcatagagctagcaattagcaaagccattgcttctaaccagtgtgcattttgccttgcacaataaactacattaaaagatttactttagtttttctacctcccaattgaagccactatcagatatatagtctaaacttagatttgattctgtttagaaacacttaatgttcctaatgttatcaggaaatttgctgttcattttttcaagatctgagtagaatgtcacattctccatgaactttccatgatgctcttcttccaaatgtttctgtagcacctggttgtagcctggctcttaggattcccctgtctgtgctctggacttctttagaagcaccttgtctggttcagttactgcctttgtttgtattgctggcacattcctttgtgcttggtgcatagtagataattaatagatatttgttaaattgaactggatgcttaataaatgtttggatctaattatgatcttaactctggtgtgtacttcaggtacttcaggaaggtcattgcagcattagatgactatggagaccctcagtgttttagactgagatgacttgccattcctacaagagatcaattgaatgaataattggggctgatttttccctaagtattgcttagaacatatactgttttttttctcctcaaaaattgccagttatattgccatactggacaaaataaaactgttagctatatatctatatctatacctatataaattttaaaaacgtagcacaaagtttctgcaccatactttgtgagcagctctgtgtattccaaggctcagaaaatcagactttcaaagctaaattttaccaatatatatcccattgaaatttgcatgagcaagcagaaataatgtggatgttggagttaggtaaatgaatcaaatcctggttcagccactttctaggtatgtgattttgggcaagatatttaatttttttcaacatagtttttttatttttaaaatggaaaagttatgcactggcagatttggaggatgaaataatatgttgggagacagtgtgttaagttacttctcaaaaagttctattataattataggttgctaatttttggcatattttcattttaaaacttttattctaatttcattcttaaacagtgtaagcatattcacagtagcttttctgatcaccttatacccaagcactgccacatgacttctggtccagtgttccaagtgaaggccaagtaatgtcaaggtatgctgtatacggattttctaggagtgtgaataaagaagaggaatggagccatccatggatggcaaagtcatgccgttgcaataagtactacatttacatatttagtacagatcccatcttagaaagggtggatttggtcgggtgcggtggcttacgtctgtgtgatttcagcactttgggaggctgaggtgagcagatcgcttgagcccaggagtttgagaccagccaggacaacatagcaagacctgtctctctctttctctctttttttttaaaggctccctgctcatgaggaatggggagagggaagaaagggtggatttggagaaggttatagcagtgagtatggctgtaaatttgcaaggaataactttttttatttccaacagtgattgctttagataaatattttattgtagatttcaatattgttgcaattgtatttgactcagcaaaaatagtttttataatttgtcaacagaacttctttaaaatggcttcctaagttgtttcagctaattatgaggtatggtgatctcaacctccttccaaccactggtccactcttgagtcttcaggcttttttttttgcttcaagagtagcattgtaagtttttagtcttcagagaacaggaagaattctagtttctcagttcttgttctgatcaggattgtattttcttttcgtcagtttgtgctctgaaactgcagggccaggcagagtccatgctacctgataaagcatctggaaccatggaaaactgagggtggatatgatgagcctctctaataccagagatagtggacagaagccatccgttttgcatttggcttttttgaggactcagtaaatccacacagagaattagctaaggctgtttgagaaacagcctgtgggataatgaacacttttatgctttttaaaatgaccacggggagcctcatcagaagaggcgattccaggattccaagatggcagctgggtttttcattgttcctgtgggacttgcactgtgaagtgtgattgtagctgatttttcctttcaacaggaattcattaggggtatccattagctaatgaactattgatataagaaaaaaggtcagttattttagagaggaaaaatgtggctttaactctcgattatttgtgtgttgggtccatttgaaggcttcttcccctggctcaaaatctggaaaactgatttgaaagaccttcagttttatttagaaagaaggaaaaacagattatttcagttactttatgttttgtgatttttactcgatttacctaaagagaaagtgctcagatttaaattctaggtaccttcgttgctaattattttttactgcacttttatggccattttttatttctaaggattgaacccttttttttgtagttttctctcaagggctaatatttatatttttttgcttccaaaaactgttaaagtctgaaagtgtaaatttatatttgtggtgtttactttgtcctttaaatgtttttgtgtacccatactttttgtcataaagatggaaaaatgatattaaattaaccaaatgaaagtaattaatgctgaacattcactaaattattaagatgttaatgtgattccaaatgcagatagttcatgggcagcagcatgtgtcctgggactccccctcaaaggttggcaaggtttgggcaattttgagggagggagttaattcttaagtagtaagctttttcgtttacctctactatttataagctaatatgcaggatcattgtaaattagtgaaaagtgcattccattgaactagtagttgtaatactgggttaaatatctaagttgtgtgactttgggcatgagtttctgcctctgtgggtcttatttttccctgttatcagaactgtagcattggactagatcatgtttccttgtgtgttttttggaaaatgtgacaatatactaggacctacatgaagtcacagtataaacacccaagggacacaacaggcatatcttcctgcctttcatatctattcacttgaggcttttggtaagacattaattttatacttaagcaaacatattaaagactgaaaggaactcatatatcttcatatagtgttaaagatattaacacaaaaatgaaagaaatattgtccatacagcaggccacagatagatatcccttgttttgtgatcagtcttttctgctatggagggcactttggacacatttgaggatcactgcattagatgacaggaaatgtgtttcttcctatgctcaagttgtgtagccatgacatttgaggatatttacattttgaatttccctcctccctcccctaaattagtggcatgttctagagaagggttcatgtgctttatttacataaaacctatctcaatgttgtttgataagaatctgttaagagatcttgtcctaaaaggatggcacttagtgttggaactggagaatggtggggtgtgaggagttaaagtaattccctaagcacactagacacgcctgatgcccctttcaagccagtctgcttccacgtggtgattctttctgattcccattatcactgtgtccccctcacccctgccatttagcctagattctggcagaatggaaatccacgtttctgaatttagtatgatttttttttctttccttctattctcagcaacaataagtactcttgatggcagctgctgtattaagcccaagagcttaaaagattaaagaaaccactaacagcagtaaggaggaagtttaagggcctgtttttctgaaggtttgtgttttcattctgatggttgagtagaaaattacaaacaggttgtgttcggcagctggaatgctctccaacatctggggagacccagccttctgtttatttcccattcattggaagggtggccagccagtagcagaaactgcaggcagagatactagaactctttgggtacataagccgttagaaattctttttttgtagaaatttcttcatagaaataccttgttctctattttttcataagcttgactgagcacttaacttcaggtcagttgctgaggaagaggtctgaaggtaatattagtacccccccaactactttcagctggaaacaagagttgtttgggcccttactgagttcctactttagagtcaagggctggccttcccctgcatctgtctgcatatacctcacagctgagcagataacatatttgtgcagctattcccttatgatttcctctctattagagagaggtggagcctatgacagactgcagagtgtttgctccattcttccccaccccgtagctttactgaggtatagttgataattaaagtatttacatatatttaaggtatatagcttgattatgagatatataagtatacattgtgaatattcaaaatcaaactaatcaatcactccacatagttaccgcttttctttttatagtgagaatacttagtatctaccttcttagcaaattttatttatgccacatagtgactatagttaacaatattatatactcaaacccagttattttaatttttaatttttttagagctaggatctcgctctgttgctcaggttagagtgcagtggtgctatcatagctcactgcaacctcaaactcctgggctcaagcagtcccgccatctcagcctcccaagtagttaggactacaggtatataccgccatgcctggcctaatttttatttttagagatgaagtctagctttgttgcccagactggaatgcagtggcatgatcatagctcactgtaggctcgaactcctgggcttaagtgattctcctgccttggccccccagttgctgcgagaatggtgccttgttctcaaaaccattttgtaaaaagtaatgtgctggccaaataaaacagaacgccagtttgttatttttggacagcttcattattttgtacatgggaaaagagaagttcgaagttttgccttatgcaaggtcataaagctggtcagtggcccaaccaggtttagaacctttatctttggggctatttgagaaattcaagtgatcccagttcaatcattagtggcatttgtggtcttcagtctgcactgagcaagggtttcatgtttggtgtctaatattttaggattattagagctaatctagcctttggagaagccaaatggattttgggggttgtctgtaagaacccatcatgatggctggaacagctcttaagtggaacttctacataaatcaacttgcatttgttctgtaacaccatgtgaattttcctgaatttccaagtaaatatattttgcatattgcttacaaattgcttaggctgtcttcatgaataatgaaagctgtgctgtaggaagctggatattaagaaggggtgtttttaaaaacagtatttcatttcttttgcttatattttctgtagcctcaagggtgtgttcagaggtggtagggagggagggtgctgttaaggtttctcaacacctgtgttcctttacagaccattatctcttctgctatcaaagaggacttgccagttaggtcaggatgcataaacctctggacagtgccttctcctatgcttatctttgctatatgtcttgttgtgtgtttagcttccataacaaggttctctacttctccagtttaagaagaaatcatctgttgtgctgaacctctattcatctcagtagggaaggcaccagcttcaagaggctgagaagagacccagagccagcaaatgagacatggggttttattaggggcttacatacaggggagagagtccagtggtggcagactggacaacatactggcaccgctcagtggcagagggctgggcaggaaaactgcagccgctttgcaaacagcatgcagtttatatagcattttcaattaacaccctccccttaacaactttcacctggcaacttgcatgccaacccaaagtttagggcctcaattccctgtatggcccatgttccgtggcatgggcagggggctcagatgttcctcctagacaaggaatgaatctctggattggccactgtgggactccctagctcgacacacacattcaggtgcatctgccatacagtgtcattttaagggtatgctcaagttattgctctcagaggtgtttaccctactattatcatttgacaataatacctatatgtgacgtacattgtctagtgacagtcctgatttccagtagctcccacaacaacttcataagtatcatagccccactttttaggtaaagaaagcagaggtttggggattgtgtcttccctagtcgacacaccttgacagtgtagaaccagcattcagaggcaaatctcacttaggcctggtgttctttccaacatgcctcagctgctgctttgccttctctttctcccttcacctggcattttgaccacactaattgtgctggcatctcattccagggagtatgggatgagatgccagcactagagtatggctttcaaaacattttttgtcccagctcacagttacaaatacagtttatgtcatcaagtatacatacatatgcacatgctcaaatgcacatacatacctgtgcttacatgtactcatataaaactgaaagtttaattatatatgcagtaaactctaatatttccttttctgttttacactgttaatacatactcacctgtaaccgttattactcactaaattggttttacaatcaagatcacctgcggttgaaacagtgctatagagtggaaatctttacggtgagttatgtgctctctcccctcaaccccttacgagatttttaggataatccatgggagcacgaaaaaaacggttgaaattatattttgatttatttccatcttaaggaagagattaaatgttgctgttacttaatatccgagttgacagtgcagcatcactcgggctgtgaaacagtcagtccagtgctctgtagagtgtggcaggtcctgaaggaagagtgggagttcctaaagtggcacactccttcagcctttcgttgtgtgatgtgctccagtttgtatggctcataaagcatgttagtaggttatattatttacttttggcaaagagaacaagtggttttatttttatttttcttttgagacagggtctcattccattgtccaggctgtaatgcagtggtgtgatcacaactcactgcagcctcaacctcctgggcacaggtgatcctcctacctcagccttccaagtagctggaaatataggtgtggatcaccacgcctgactaagttttttctttttgttctttctttttttttttttttttggagagacggggttttgccaggctggcctcaaactcctgctgaagcaattcgcctgccttggcccccagaagttctggtattacatgtgggagccaccgcaactggcagagagcaagtgatttttaagagtttcatcaaagaaactgtggaatgagagaacataaacacagggcaacagcaggaaaatgacagagttgacttttttgttttaatgagctccttatcaaccgcatcgctgggtacaaacagcgactatatagtcatatctagtagggagtcagacaaaaaattgaagctattttaacaagtgagaacttaggtttatatccatgattgttaatgatttaccttgtcctgaatggatgttgtaccctgagatattagctaatatcattatgttggataaaatattaaaagttgtattcattttatctttgtgtcattccttatgtttatttgtatattttatgatatatgtgatatatctgtgccttatagttacatatatattggggaatatgttagaatttttttgtactgataaagattcctaattaaaaacatttggagaccatttctattctggaggactaagtaattattaatgggtatcttggggtctagatgaagagaaggaaaaggtgaggacacaggaagggagtgaaacagggagggtgtttgtgtacaaattagataacaaccctcccaagtggattcagttccaggggcacatggtttggtgagtggcctgtgccttcgtgcaggttataaaaagtctcccctttctcctggcatagcagctctacactagggcacatggtttggcaaatgggttgtgggctggaattcagcaccctttcagcccttcatccttctgcaagtgtagcctacacaagtaagtatatgtaacagccctggtggtgaggtactgaaaataaataaataaaagggcgaaggacaggcattcatggatgtagtgagcagcaacagctagtcctcactcttttattcattcattcattccttcaccagagtatttatagaacacctgctgtgtgccagccatcttcaacagcaggagttggcaaactatagcccaccggccaatcccgacctggtatctttttttgtaaatcgggttttattggaacatacctgtaccccttggtttatgtatcttctgtggctgcttcttagctataatggcatagttgaataattatgacagagactgtatggcctgcaaaacctaaagtatttactttctggccctttactgaaaacaggcgtgaacctctactctagaatataaatcaggacttgcttctggtgccactgcatgataacttagccatggactgtttggcttctatctcatgttccctacttgcaagaaaatacttccatcagggccaagtggaggtgcagtagagcaggggcagagctaaaagcaacacagctgggcacatttacttcttaggtctctacacaaaccatgtagtgtaaggaggagacaaagggctaggagtccagagactgacactgtgtggccttctctctgggcctgtttcagatagtcactctgcaactacaagatggcactggattagtgattctcagacgtttttctgcaccaaaatcacctaaaaggctggtttaaccgactgctaggctccacctccaaggtgtctgagtcggtaggcctgaggaaggcctgagaatgtacatttttaacaagtcctcaggtaatgcaggtaggcagtatgactggattgtttttgtggttgcctgcctctttttggcattggaaaggggaaagccagagtattccttgaggaatgacatttggagagaaccaaattttagatgcttctgtgatatgtacaccagagctattctggactagattgtaaattctcacatttcacctatgcaaaaggaaatactttctggtctcctattagtaatcagttgtctcaaattttgcccgttacctctggaaattctggaccctcaagtgatcagtcttttaaggcagtgtggaagaacagcacctattatggcagttgatttttcatggtctctaccctgtccttcctaatataactgctattctttaccttcctgtttttcaaaactctcgtattgttcctgttgtgttttttctaaatattttcttggttacaataaagtgctaatatttaaagagcttttgggagcctgctggtgccagaaactattcaagttacttacagaatactctcattcagttctctcaaaaatccttggggaagttttatttttctcattttacaaatgagcagtaattacaaatttggagtcagagaagctaagtaatatgtgatctggacaatttcaatatctatgtatatcaaaaaccaagcttcctaggtctttgacctcctctccagtatccctcaccttcacctgctaagtatccattctcattttggatctcggactttgttatcacctaggattcgcccaggatttcactttctcggatcatgaccttccacatcatactgtcactgcatctcaggagtctgtttcttggaaaagctttacgtctcttatcctttttcttttccaacagaaatacctttctgaactatttctctctcttaaacctcttttaaaatctgcacacttcatactaaattgtattgattatgcttctagttccctagtacataataacctttggaaaaattgttttgtcttactaattgtttctatagaactctgtactgcacctggtgtatagaaggcactccataaataatggtttaactgagctagagaatatatggccagggtctgagtccgagtctgtcttgcttcacagtatggctgctatagtcaggtctgccacagctctaggcctatttttttttaatctgtctggatgaagaaggaattgtttagtaggtgatgtcatttgtgggatgctttgtctatttctgcgtatccagcatgcttttagtgatttttcattttgtcagactgcattttctcttttcaactagagttcaaacaaaataattttagataacatcctaagaacatttggaaacatgacatttcaggtctattttccctctttgccttaaaaaagtatatacagctataattactaattgctgcgctctaagtagagacagatgatacatatgtttgtgacaattttccagagggagagctaagtaaccaggctcatttttccataatgtgaatgttattcacaaactattaccataattgatgcaccaaaccactgtagagtaaataatgtgttgtgtgtgggaagcaagctagtagtcaatgaatattaaagaacaaaacctcattttaaaagagaaactgtaattaaaatcattctgaattcatgctgcacaaccagttaaaataacttggctgccatttatctgtgtaattctgtgtataaagggagtaggtatatgatttgttatatagaagtaagtatttacatgcacatttttatgaaaagacacaatatcgaacttcagaatcagtcgttttccaaaaacatttgttggagagatgaacatgcagagttaatcagtgaaatatatattgacaggaaagatcaccatttccgttatcttatcttttgcttttctaggtgttttatgtctacctggaatgtcgtgtccctttccgtggacctaatcagcttctgtattttctccaaagcttccttttcatcagaagttgttcttgtccacttttaatccctcttactgctttctaggtgctcatcaacttctgtgtgtggtatattgatttgcacttttgggatttgttgttttataagaggaggtcataagtcatttcttgtgtgtatcattagtcttctcaacgagactgcctaggatttcagtctcagattattctatgtgtgtgttgggcgtgtatgtatgtgtatcattccttccggtgtaccttgtggagaatggtttgctgtccatgtgttcgctaactcctcagtatgtattgttggttacctgttttcatgcaccagatactgcattatttttgtaaaatctttacattttgtgtttggctaccagtgtctccacagagtcttgaatgtaactggtaaggatcagatctgttggtgtagagtttttgatggaacactcaatcagcaatctgtagtatggcttatgtaaaatgtataactccctctatctctgataagttctgaagtctaaggggaaagtgcttccctgtctcttgaatttgagtgttttgggtgagtccattttatagatagacaaggtgattgtatcagagcttacttttatattttaaaatggatcatagtgtacctattcttaggaaccttttaggaaaatctctttaacattgatcctgttgttagttgtaatctcagtatattctgataatttcctttgaatatgtaactgttcctttcatactgtgggcatctgttgtcttctctttttatagcaatgaaagtatgaacagattccaatgtgggttcttagctcaaaattctctggctctaatgtcaggccaatttatttagctagtttatacaactggacatatttctataatagaaaaatgactaaatgtttcttaacatattgtttacagagatagagcccatgttgtaaggctatgtaactcttcctctcaaaagaagattattggttttagcatgttttcctccctttaatttaatcttaagcaggtgaacctttttgagggctttttggaaagctctgaggaaaaaaaataagaaaactcatacaacctcaaggaattctaagtatcaaggagcacctctgtgaaggtgattggttcaagcattgaacactattttctatccttccacacatggcagggcattattcatgtatccagctctgtgatagcttgtttttgcttgccctgatgatacgtatggcaagggaggaatattatccaggagtggacactgtagagaggggaaggaaccttggaactgacctttatagaggcggttctcatcctcaactcttcttccttacaagatggcttggtatcccttgagatcattctcccaccttcaaaatcctggatgggcctcttgcctggttcccttaaggactctaaaccacttagcttggagctggtgccatttaattctgttcttggcagtgggccctggcttctttcctgctaggccctgtacctcttaggagcagagaagaggtcagatgcagataatacaggcatgatttctgcctcctgaaatgctcagatgatatgcacttctccgtccccctaaagatttaaggaagtacacatttatcatgggatgtaatgagtaggaaagagcatggggctttctttttctgctgaatagcagattgtaagatagaaacagttttgtttacaattcagctctatctttgtactttgcattgcagttgaagttatttttagctttactgttaagctaaacgtctgagttgtttcatttgcaaattctttctttgagggtcaggggaggcttttgtaaaatgttcaggtctgagagaattttgagttaggtaaaggtgagtgtgtgcatgcatgcatgtatgtgtatgtgtgtgtgtgtgtgtgcacagctcgtgcataaatgcctgtgtgcttgcttgggtagggactaggagggctgaaaaagagagagaaagtcattcttagcagaagaaaagcacgtacaaagggtggaagacgtacggtttttgacagatgaatgaatccttctaaaggttttgtaagagctgtgaccagctctgtttgctgagaaaagggaaagtccttgagcacccatcatacctcttcagactctcttaaaaagcattcagatgttctgccagaggaaatgatgtgttccaactacagctgcagtggagggttctttttgtgcagctgaagcaattcctccacatagattgtcccattttaacagtaaactgtctgtttaaaacaaaacaaaaaaggtgggtgggaaatggaaggagaaggagtttatgccaggaaatgaaaataagttgctgcagaagcctgttttggttgtggtttcagagttaaggataagttattaataataataataagagcccacttgatagtttgttatatctctgtgtgtgtttttatgaacttttaattttccagaaaacattaaagataaattagagaacacactcctgttggaggaggtgaccatcttgcagctaccaaaccatagaatctttcaccacttaacaccttccaaggaaccgggtagacttctggtgtcctctctggtcctcttcccttccttataggatgtcaggctttggacttaatcagaggataattaaggctctatcatagcaggtgaagtttctgagtggaagtctaagaagtgatgtttctataagtgtctttagctgactgagctactaagcagaggttaggaggttgtgatgtaatttaaagtgacattgtggttaccttttatcaagctcaattgtgagcctggagctatgttaactgcttcacagctatgagcctatttaattcttacaggaatcctcattttaagataggtttgattaccctccgtttacagatggggaacttgaggtagagagataagtggttagtttgcaattacacccagcatttggcatggctgggattggaaccaggggccttcagtcttcaaagctcttacatgtaaccactgagtgatgcattgtactctctcctgtaaagtagccttttctccctgctgccactggttcatttccttttccttttttaagatgctttaaaaagaacaaaaaccaataacgtacctcctaaattgaggttgatctccctccttcctatccaataagtaatgttctagactcatgcaaatattagatatttgggagaaaaaatgaatagaacatgtccctcctctctttagctctaagaaaatttgtgtgttcttattaattcctactgttccactatcctaccatattacctgatacatataatacagttacagtcttctcagggagactcttctatgcagtggcatgctggagccaggaaagcttgtaaacccagctcagacatggaccagctgtgagaccttggtgaagtcactttaccctccgggctttacttcttttatcactgtagtgtttgatccaggtcagttcgcagcctggaaggcacagccttttccaggacactaaatagggcacatgtgctacccatttgcgtgcacactatccttaggcatttgttgaagagatggttaataaaatataaactcattaaaaagcattactaaattcttacattttgtgtttctttgatcagtgaatgactgctaaaatttagtacgttatcaatggggaatttgttatctctttttgcataaaaggggtcctcggttttcgtgaagtttaaagtccctccccaggtagaatatccataaagcctatgaatgagtcttaactacttgattacccagattctagctttttggaatctttcattaccttacttttttcccttctcggtgagcttttggacttaggacaaacggggaacgatcacaaggaaatggattgacatctctactctttcacaatctttcctgaagacatgatttttttttgctatcatgtctctaagtacagttggtcagttgtcactctgtcaccttaccttccaaccccataattcctgtgaaaccctggacacctcactctttttgcagaccatgagctcctctggcctcactcctttccttgtccagcttgcagtacttgagtaatcccctcacccctcaccaccttccttattagtacccccagttccctgaagctcttgtcctgcccatttcctcccagcagcatgtcactcatctgccctcatgagcctgtgttccccttacaagaatcacatctctatctgtactgttattatagatcagtgaacttcaacatctgatagctttttcagtgttgcccatcagtgcatttaccgagttgctttttctatccttttggtgatagttccaaatgctccccactgtccccacggctataatgataggaaacattaatacaaaacttggttgtgttggagaaagtgtgctaagaactttacatgcattgtctcatctccgttcttgctaaaggatctaacttttccttccaaccatccagcaactactagcgaggcatcaactgtgtctatgcatggtgccaagccacagactgtagctatgattgatgcagattgggtgcttgctctcaagagacctctaattcagagggagatgcacagaagtaaacaggcagcaataacattgtccgataagtgctaatgaggggagaagttcaatacgctatagatgcccccaacccagacttagggttgaggataaggaaaacttgcaggaagttacagctcagtgccaatctaaaggacgagagactatgagggaggaacataagggcattctggacaaaaagaatacctggctgctggaaagatttcagggaattgagaggggccagtaggaacagagccattcttctcagagaaattagaggtcttatttttggtgtgaattccatagactctcttttctacctcctctgtgatctgtatcctcacttggttactaactggaattagaatcccctgcaatccttcactgtatgcagatctcgtaagacacactttctgtcaatctcagtgtgaagttttactatgcacttgtatagctgctccactgaaatactattagactgttaaggtgagtgtagaggacaatgcttcttcaaaattattacagggaagtttataataatggtgactgacttgaggtaggggtagggtttttcaggagggtctttcagtggtaatcacgcctaaaattttgaatgcttaaatgaagctgctgcttagctcaatgataagtaatagcagcttctttttccatgaggacatttattaaatgatgttttaggtctcagcaaatgttacgccttcagacaccttggctcaggaaagcctgatgtgcctccagtgaaggatttgtaggtccacatcttcgatgcttctgcaacacagagttagggaaatgaaacagtgggtcatacatgctcctgatccattgccaacagcaaagggacttgagcccccacataccttttgacccttctggtcatgataaagccacccactagctataatgctatagtcagcagtagaaataagagggagcacaaagcaactgaatggtaaaatatttcagacctttttggaccactttggaagatggaagctgataacatcatacatccaaattcctctgcattgctgtctctctctttacaggtggggaatagtttacagcaatcagtagaatctacttttgattccaaatgggtcttaattattttgtatttgggaaatattttttacttggcaatagagatgtgccataatattatttaatattttggaaatcactgtttcccatgtgcctgaacatctcgagcacatttaccctgagcgtggcagtgcctgggtgtctcacatccatgtatgctcaaaccatgctccttgatttcacccctttctctctgtttctttcatctcgtaaactgagtgctgatgccatttcacactttttcttggaagtttaatgagttagtagtagtataacaaaaataaaaatattttctttacgtttctgaaaagaaatatgtctataaagcgtcaatcatttttccaagctgttagttcctgctgctgagtactaggagctgttctgtcagcaagaccacgtaagggggaatagtaagagaaagctgtcccaattttctttctctggtacaaaaggttagaagatgttgtttcagctggagaacttaagatggattcttattcactatttgctaaagagactggactgtttttagtgtgataattttctgtaggcgtggagaaaggtcacctcctgatcttgttttggagatcatggggttaaatctgtggcagtgtccttttcctagacacagcctcttgtcaaaataatgtttggccaggtgttaatctgtgtcctgaggggagtgctggaattcattattcatcccgtgggagtaggggtcagaggagaaggttgtccttctgggaggtaccaggggacatagcctgcctcctgcctttactgacatgtgccatttgtgaggagggcagttgaagtccatttgaggaattctcttgtcagccggccaacacagaaacacagagggagtgggagggagggagaggcaggcagcttggcaaggcagtcctggagtgcagtttccggagcaagatcacacacagtgttttaggagctcagggaaggtgtgcaggaacataaaggggaagggggccaggtttgaaagagtggatttttcctattttttccaccttttattcctcctgtctttgaatacttgtcatcctttggaaaactcagcatcggaaagaagcctttgctgacacactgctttttctccagcgctatattgtgggttttttgtttttgctcttttcatttttcttttcctctgagggcaggaggtgagacaatgatcaagtcaagctggttctatgttaagttcaagtatgcagagaaggtaagtcaatatggtttcttttcccaggggaaacctgccacctccctccagtcttgtcatgttgatgggctcctctggccacttggggaagtgaatgaagctgagaagttgtatttgtgaatgtatttcctttggcttaatgatccttggatgaagcacaagctctttgcttgcaatctgacgttgccgctgaccaagtggaagcaatcttcagactctgttccggaggcatgatttagagtttaaagaggggaaataatgaaactacaataacaggaaaggcaggatattctgctttagattgaatagagaattttcaaggtattatttgttacaaaggtagatatatttttggttctgaaacaaattgacagtcacttcctattacctgttggcttagaatttttttcctctttcagttaactaactgcttactcatttgtagtcttacttggttgtagaaagaatccccataaggttgtctgaccatatatgagatgatctctttactgtctgtcaggggattatattttatgaatgaattttggttgtacctaaaattttgatgttaaacagttccactgtattttaacataccatttctggacttttaggggaaaagtgtactttctaatacatcttcacttaccggggctgtttgacatctttttggttccacatccatatgtgtcacttactctgttgggaatttacaggattagaaatgaggtttccaggagaggatatagctcagaggtagagcattggactgcagatcaagaaatgagatttccaggaggatcctaacgtgtgcctcccttttgaaatcttccctccttgatttgattgttgaaaacgttggcatattgattgtagagttaagctgaggctctatagaatggaactgtgatgtggcaagatggaaaattgtgcgactgtctttatactccttatgattatatgcataagcacattaaatatgcctcttccattcacctagtttaaaaaaaaagttagaacattttcaactcctttttactgcattttttttttctgtgtggacttgtttctgctgtgtttttaagacagcaaaattactctttctttacccatgttgaaattacaggatttttatttaaaatatccattttttattttaaactcacttgcattgttaactattaaagctattataagtaaaatattatctattcatgcacaggattgggaaagattgtggtttgggatttttttttctcagtagattactttcctttgagaagccgaccatccattgtttgctgttatgaattttgataactgaaaactgtactctgccttcttatgctttcccttttatcttgaatgttctgtcatgggaacctgaaactcaagagttaaggcacgtaaataaactaatgtgaaaaggggaaaagcatttccagaaatgattgtcataaaaagaaaaagaaggagaacgttaagttaattgcttcatttgaattaccatgctgctattcctttagcaaccaaacaagcagagaatgcttccatatggcaaggcacaagtgtaatgtaaagctaagtaatgtaaggctctatacctaattgaaggatattcgtcttgattttatgaggatagaagaaaaagagaaatctcattcttgttcttggcatggttatggtgctcaagatctcagtgattctctgcagaacttttgttctttcacaatgattcaatttaaaaattttcattggagatttttgttttccaaaactcatcaagatggattgagttttaacctagagagataataagtcttagtgtaaacacagggacagcattgataacaaaacaaactaaaaccatcttttttgtattcctctaaaaagccattcttacaaaggctttttgatttggaatttccctcactatctttaaaaggacaaaaaaagaaattcctctcttgattgtcaactactgaccattttgatttgatataagcttgtaattgttggaaagatatttctgctgtgatgtttgtccaaaactataagaaaatacatcacacaatctcttcaatatccatctcctagtttatcatttaggaagatgatttaatcagtcttcagtagtgagaaagaaaaattaagaatggcaagtaacgcatgaccaaaaacattggcataagagaatactgttcacttgtgatcactggaatcatgatccctttcaaaaattaaaatatataataaaacaaacactgtttttttaaccaccaccacactaacacacatgttcctctgtaagaatttccatctaaattatttatgagttgtctctttcttgaattagattggtgcctagctatctttctttctaaaagagtgcttacttcaattaatttcatcctataccccctttctctttttattctacatattctccctgagcaatttcctttttggtgtgtttttctatgtcctataagtgatgattccaaaagctctatatctagcataatatctttcttgagtttctgaggtatatatttaattggttaggtagatatctgtcctgaagttcaacagattcctcaaatgcagcatttctaaagtatagttaatttcttcttccttaaccaaggattttcttcctcttacatctcctagcacagctaaggcatccctatccagccagtcatctttgttcccaaaggagctgttttagttctgttcttatcatctcccttctggcttattagaggagcctcctaatcgatctccctgccacattcatggtgcttccagtgctccaaaaccctgctagaggtatcttaaaaggtcagtctgagtctgttttgctgcttgttaatggttcccctctcccatctaagcattctcactacatctccctcaacagtgctagcccttgaccttgtatatacataatacaccttattgtaatttcttattcacctgcgtcttctatagtaacatatgatcctagagatacagaattacattgtgtttttgattttgatttttctatccagaatccctgcacgtaatagatatttattccctgttgggtgttgtggctcatccttataatcccagcactttgggaggccaaggcgggagaatcccttgatcccaggagttcaagacaaacctgagcaacatagcaagacctcattatctgcaaaattaaaaattaaaaaattagctggtgtggtagcgtgtgtctgtggtctcagctacttgggaggctgaggtgggaggttcacctgagcctgggaggtcgaggctgcagtgggctatgatcccaccactgcactttagcttgggcgacagagcaagaccctgtctcaaaaaaccatttttcccccctaaatgctactgagtaaatctgtgactttttcccaggagtctggccgacctgagtttgaattctgcttctgccatttactggtagtatatgaccttgggcaatatattgaaactcaattgaattgttttctcatctattaaatgaggagtattatcacctaatgtatttttcagttaaacttcttattttgagataatggtagtacgtaataatagtacaatatgcagttttaagaaataaaatgtaaagatcccatatgccctttacctagtttcctcaatggtaacatattgtaaaaccatagtaaaatatcacaacaaggatattgacatcagtacagtgaaaatacagaacaaccacatcaccaaaagtctctctcctgatggcctttgatagccatgcctctttccttctaccttcacaacccccatcattaactcctgatatgcaatcacttttctccatttttataattttgtcgtctcaagaatgttatataaatggaatcatacaggatgcagctttttggaattttctgtttttactcagcataatgttttagagattcgttcaagttgtatgctattagtttctgagtagtattctatggtatgggtgtaccatagtttatttaatcattcttctgttgatggacatctgagttgttttcctagaagtactatgaacatttgtttataggttttgttgtgaacataagttttcttttctctaggataattgtccaagagtgcagttgctgggtagtatgtatagtatttgcgtggttaatttttaagaagccaccaaactgtcttcctggctgactctactattgcatattctctttagtgcactgtattagcgattccgtttacttgcgcattcaccagcatgcaatgatgttggtggtgtttctggttttttattttagccattctattggtgtgtactgatggtgtccagtgatgggttttaatttgcgtttccctaatggctaataatgttgaacatcttttcatttgcttatttgtcatttgagtatcttcttttgttaaatgtctcttgctctttaaatgtcttttgcccattttctaattggatttaaaaatttttactgttgagtttttcacagttcctaatattttctagacagtaagtctttattgggtatgtggtttgcacatattttcttctaatttatagcttgtctattcatcctctttcagagtcttcctcagagtagaagttttaaactttgatgcagtccagtgtatggatcctttcctttatattcttgcttttattgtcaagtcttaaaactctttgcttatcctttgatcctgaagatttttcttttccttttttcctaaaagctttatatttcatatttaagtccatgatccattttgagataaattttttataagatatgaaacttaggtcaaagtttttctttgtgtgtgtgtgcgtgcatgtgtgtgtgtgtgtgtgtgtgtgtgtgtgcacgttcctgtatatgtccagttgttttagcaccacttatggaaaagactattctttctccattaaattgttcttgtacctttgtccaaaatcagtttactgtacttaaatgggtctgttttgggtttctctattcctcaattgatttaatgtctgttcctctaccaagatcaaaaagtcttgattactgtagctattctttttcaaaattgcttaagataaaatagtacctgtgttttttcatataaattttataataacctcatctgtgtttacagaaaatctttccggtgttttgataagaattgtgttaaaccaggatattggttttgggaattttttttttaagtactttgttgagtctttctcttcatgaagaggtttgtctctccgtttatttagatcttgtttgatctcttttatcattttgtagttttcagcatacaagtcctatatgaattagatttataactatcacttttggggggcacttgaaatggtattgtatttctaatttagattttacatgcatattgttagtatacagaatacaacttattttcaaatgttgttttttgtatcctgtaaccttgataaatggagttattagtttgaggaacttatttgtagttctttgaaattttctgtatagacaattatgtcatttgcaaatgaggacagatttatttcttcctatctgatatctatgctttttaaatttccttttcttggctaattgcactgagtagaacttctcatgcggtgtgaactaagagtggtgagagtgaatatccttgtcttgttcctgatatttggggaaaaatgcattcagtcttttgctgtttagtacaatgttagctgtaggatttttctctatgttctttatcaaattgaagtagttcctttctattcctagttttctgagattttttttatcatgaatggatgtagaattttgccaaatgctttttctgtgttaattgatataattattaggtttttcttttatagcctattaatacggtagagtacattgcttgattttcagatattgaaccattcttgcaagcctggaaaaagttctatttagtcaatgtgtataattctttgtatgtatcgctcaattttatttacttatattttgttaaggacttttgcatctgtacttacgagaaatactggtctgtaattttctttttgtaatggttttattatgaggatattactggctccataaaatgatttaaaagtgttcactccttatttgtttgctggaagagattatgtataattggttttcattcttctttaaacattgtgtggaattctgtagtggaaacccatctgggtctggaaacgtcttttttagatattgttaatttaagaaattaaattttcttaatttaagttattgggctacttaaattactgtttttcatatttggtgggttctggtagtttttctttgtaaggaagtggtccacttcatctaagttgtcaaatttaagtgtgcagaactgttgatagtattctttattgacttcttgatgtctgtatagttatattccttgtttcatccctgatattgataataatgtctgtgtcttttttctgtgtcagtcatactagatgtttgtcaattttattgatttttttcaaagaacaagttttgtgttccattgatttttctctcttgttttcctgttttcaacttatttttttctattctgttatcttaattatttcttccatctgcaagctagaaaaccaggaaagctggagagtgtagttcagtctgactctgaaggcctgagaatgaggggtccagtggcgtaaatctcttttcaagactgaaggcctgagaaccacaagggctgatgttccatctccaagggcaggagatttggatgtcccagctcaaacagagagtaaatttctccttcctctgcctttttgttctgtttgggtctcaatggattgaatgaggtccacgtgcccaaatagggcatcttctttaataagtctaccaattcaaatgctattctcttccagaaacatactcacagacataccaaaaaataatgttttaccagctctttaagttgacacataaatttaacaatcacatgtatctttttttaatttttgctgcctatattgttttatttaaagagagtttcttatggatagcatagagttgattcatttttacaagttactgtatcattgctctttcttctgtcctagtgacttaagatcctttcttttagctatttttttttaaaaatagaacttcctttagccattcttttagggtagttctcccagtaactatttatttatttatttatttttatatgaggttgtcttgattacctgttgcttactgaggaatgtttgcacttgatgtagaattttggttgacagtttcttttgtctttttctttctttcttttctttttctttcaagccattgaaaaatgttgttctctttcttctggccttcagggtttctcatgagacatccactatccttcttttgtctagatgtcatgacttctttctccctggctgcttccagatttttttgctatctttagcaaagtttaactatgatgtgtcttggtgtgggtatctttgagcttattctgttttgtattatcatagctttttgaatctgtaggtgttgtttttgccaaatttgagaattttcacccatcatttcttcatgtacttttaaagccctattttccttttcctctctctctgggactctgaagacacaattgttagatctttggttataatcccacagatacctgatactctgttttttgttgttgttttgtttgtttgttttgtttttcagtctctttttttctcttttgtttagatgagtaattttagttgttctttcagttcactgattctttactctcctccacctggtcttgagcccatccgttgaatttttttaattgttttttttttatttttatttttttgaggtggagtctgctcggtcccccaggctggagtacagtggcatgatctcggctcactgcaacctctgcctcctgggttcaagcaattctcgggtctcagcctcccaagtagctgggattacatgcgtgcgctaccatgcccagctaatttttgtatttttagtagagacagggtttcaccatgttggccaggctggtcttgaactcctgacctcaggtgatccgcccaccaaagtgctctgattacaggcttgaaccatctcgcccagctgatttttaaaaaaaatgcattttactctggtaaagatgtatttaatgaaatttaccatgttaacggttattaagtatacagttcaatactgttaaatatattcacattgctgtgaaacacatatccagaagttttccatcttgcaaatctgaaactctttacccattgaacaactccattttccttgctcctctcagcccctggtagccaccagtctactttctgtttctctgaatttgactactgtggataccttatgaatatggaatatacagtatttatctttttggcactggcttatttcacttcataatatcctcaagtttcatccatgttgtagcatgtgacaagattccttcctttctaaggctatataatattccattgtatgaatatacggcatactgtttgtccattcatccattggacatttgagttgcttccacctcttggctattgtgaatagtgatgctataagaccctgcttttagttctttttggtatgtatgtagaagtgggattgttggatcatatggtagttctgtgttaaattttttgaggaacctccatagtgttttctatagcagttgcaccattttacaatcccaccattagtgcacaagtgttctaatttctccacatcctcttcaatacttgttctctgtttttcttgatagtagcaatctcaatagatctgaggggataatgcatttctctaatgattagtgatgttgagaatctttgttggctacctgtgtattatctttggagaaatttctattcaaactttttttcattttttaatcagttatttgtttttcattgtttggttgcagaagttctttacatattctggattttaaccttttttcgggcatatggtttggaaacattttttcccattccataggtttctttttcactctgttgattgtgtcctttgatgaacaaaagtttttaagtttgatgtagttccatctgtctgtttttgcttttgttacctgtgcttttgttgtcacatccaagaaagattgtcaaatccaatgtcatgaagcttttcctcaatgttttcttctagcagttttgtgattttatacttttatgtcttacatttaggtctttatccatgttgagttaatttttgtatatggtgtaaagggtccagttttattcttttgcatgtgagcgtccagttttcccacaccatttgttgaataaactatctttctccattgaacggctttgacacctttgtcaaagattgtttaaccatgtatgtgaaggtttatttctgggcttgatattatattccattggtctgtttatctgtcttcgtgccagtaccacactgttttggttaccacagttttgtaatatattttgaaatcagaaagtttaagtcctttaactttgttctttttctaaattgtttggtgatttggagtcctttgagattacatatgaattttaggatgcatttttctatttctgctaaaattgccattgggattttgatagagattgtatttatggatcatttgtggtactatggacattttaacaacagtaggtataacaatattaaagcccatggtcaaccacaaacatggaatgcctttccatttatttgtagctcttttatttcagcagtgttttgtattttgggagcagtgttggaagtctggactccagtacttgtctttacagtttccctcttttctgattctttggctaaagacaacaaacttttctaggggcttgttttggtatgtgtcattgacattactgggtttctgttttttcaactccaaatctgatgacatcatatatcatatcggatatatgagacctataaaatgaaaactcctggagaactcaccaccatgtcatttttgggggcccccaggttttaagccagtacgtcatcttcttttcacttttcagagtctgtttatatttattttatgtataatgttgagggattttagttgtacttagtgtggataatagggaaaagtatgtctactccattttcttggaagcagaagttccctaagatgcttttaaaacagtggttaaataacataatgttgagagtatttgcatggtgcaaggcctgagtgctcaatagagggtgataattgccttttattatcttcatctttctcctatttgaagtatcagtcacactttgctatagaggcagctccagtttaagtttaccttgctttagataaattgtattatcactaacacatacatttgcatcttcataccctttattgcaattccatcaagatgtagattccagaaacaacattgtcttttcagtatttttctttttccaggcaattttgacaatgcatttttgtaataagactggaattactaattctggttttattgaaaaactgttagccatttcagccagaagaagatcatggaggaaacaataaattttcttcatgagctattcaatccaacgagatactgaattaagtgcaggaaatcagtacactttttgtttgataagaagtgttcctctgaaaaaccattcttagatcattataaatattattggttggatgcagtggctcatgcctgtaatcccagcactttgggaggccaaggcaggatgattgcttgagctcaggagtttgacaccagcctaggcaacatggtgaaaccctgtctttataaaaaataaaaaaataaaaatttagctgggtgtagtggtatgtgtctatggtcccagctaattgggaggctaaagtgggaggatctcatgagctcaggagattgaggctgcaatgagccatgattgcacctctgtattccagcctggacggacagggcaagaccctgtctgtctcaaagaaacaacacacacacacacacacacacacacacacacacacacacacgcacacacgcacacacacacgcacacacacccattaccagtcttcctgggaattttattctatatctgtctataagtttaaagttatgtactctagcttagcctttaacttcagagttaatttgaaatttatttaaaaactatttttggaaatttacataatcatgatgactgcatgtaaactgttagtaatattttatagagtttccttgggttttctgttagaatgaagtaataaatttgtgtcagaaaactatttgggaaatttagaagaaatttaagctaaggaacataagctgtggagcatggccctaagaatccttttattctcatttgataaacagtagaatccagacagggaagaaccttattttctctgcctttgctagttggtggaggaaaacttgctgtttgagacaagtaggacttgatctttctatcctgtacttttttcatcatcctcaaagagggcttatttcagtggatagaccattcatagttttgacagctcaaataacccttaaggatgagcaacaactgaaaagttccaagggctttatttccaatggaaggatttcaattacagtcattttttcaagttagtacaaggaggtaaatggaatcacagtttcaaatgttaaatttgaagactacaccattaccagtgtattttggaaataaaagatgcagccaatctaaatcaaagacatgattccagattacctcataagagtatgaggaagactacaggcagcaattgagccacttgatatggaagagtatgcagtgcatcaaatgtgactttcattaagccgtgttacccttgtttgctactgagggcaggaggcatccttttcaacagcctgtaatagcttcttgttgaaaggctgcctgctatacagatgcagcagcagagagagaaaagagggatacagattcacatattcgccttgttttttaaatgccatttttgccatttttggagttggtttccagtgcttagaatagctgtaagtatatagtagttatttactgtatgtttttgtgtgagtaagtaagagaaggaattaatgaattaggctttataaactggaagtttttgttgtgcacacattaagctaagcttctatcccttctcttctccacatggtaccaccagacttttccccacttcaccccctcatctaccattttttgttttgtgtttttgtttgtttgttttttgagatggagtctctcactctgtcgcccaggctggaatgcagtgatgccactgggttccagtgatcctccagcctcagcctcctgagcagctgggattacaggcacctgccaccatgcccagctaattacatcaaccttttaaaacttatttttctctctagaatttgtttgtgtgcacttaaagagtaagtgggaggatctcaagacagtacagaaagagttggacatctagttcagttttgcagagggagtgcagagaaacttccttggagttatataattgatttttggaacctcatttgtaggatagttgtgtggagaaaggcattcaaattgcattcactgtacttcttaggccaaggtagatctggttatgtacatacttgttatttggtagaatactgcttatgttggcattatcttttccatactacatttatgaactggaaacagttaaagcttgaaactgttaaaaaaaaaaagtgtacgcttacattgtatgtattagaagtcatatgattacacatcctcatcctctcaccagtcctttcatgtagagcagcggtttgcatctttggctatacattggaactaccttgggaattaaaaaaaaaattgatgtccaagtatcaactctggagattctgattcagttgatctgggatgaagccttggcgtcaatttttttaaaaagatccccaggagtttacaatgtgcagtgagggctcgttttagaatggtatattgatttgtgttccaattgttctttcttgcataaatcacatctgtaattcattgaccacagttgtctatgaggcttattaaaaatggtataacaacttacacatacatgaataattggaatgcagaatcattttaacttccctttcccagtctttctatagtcagtttgtatttaattcaacaattgttttttgagaggcccacatttattaaatgtttatcttgtccagcttaatttctctagaaacaaaatctcaccttcattttgtacttatcactggtttacatgtggtaaataaaattagcagaaacaggtttgggtatggtccactgtggtacacgggtgtcttatagagatgagtattcattggctatgaaatgttcagtaagttttacaaaggaaacgaagatcatcagttgatctagctggtcagttggggtcagttaaaagagcattattgtaaaagatttgtggtttgcctgattttagatcagttaacattcacccatgagaaggtaggatgtatgtcatttttattttataagtgaatatgtaactgtatttttttattttgtatttaaatttttattcaatatttcaaattaattaatttctaatgttaatacctaatatacatagatataatcaatatgatcactgttatctctagagtgaagacagtttcttgccaacaatttttatatcccattataaccatccagatgagttcattatgggctttcagtacacactatcagcgcttaagagtcttgagttcattctggtctttgattatcacatgtcttgaaatacacaccacattagatttgtaaataaattgtagaaaaatcttaagactgaaatttagatattaacaaacattatttcctcttgagatatgctaacagacatcagagcattagtaggtcactaaagagtgaagatgagtcagacccatcaaaatacatatactcgttctaccacttgatatgtacacacttcgagttggtaatttattcccagttgtttgtgacggttgcatttgtgcttatcttctcttagtttcacaagggtagctaatcatgagtttttgtctgtttttgctgaactttacctactgtcttattaatcttgtttatatcagtgtgagtttcttaaggacaaggactcgtaggcaccaacacagaaagcaattttaggaatatactgtctgaattaaatgtattaaatcagtcaacaaataggaaccttttgagaaatggtcctgaaaacatttttgtttgctttttttcctagagaggaaataaacgggtttataagctgctgagtgcaagtatcatggtctgtgccttttcttcttgactgctctgctatattctctttcagaaagctgagtagctcagcacagtgaatactaaagggaatgcattccttctctctcaggggactgaagcagtgtttaacaccactgtaaaatcctcagctgtggctttctctggtgtagaatttgtctaagaaagattaaaagaacaaggaaagctttgtgtgctgtttctctttcttttcttcacccctcctgctccaggctatcctgaggggggaaaaaaaacgtggagtattttccttggacctctggagtatgcatgttatgtatgtgtgagtcttagagaaaaataaaggcaaatgcaaggcatgcctgctagtgggagtcatcacccatgggtgaaatgaagaaaactacatgagtgcgtttgcgtttatacggccactttttccattgaatgacccaaacaagatgccagtgacaaagcattggtcctacatgtgataaaacagcggcctggccatttgcttaattggtggagaactcaggtgtgttactcttggcagaggtgaaagccttcatagagaattagaaggggtataatttgggcactgtactcagaatctttcttggtatattgtttaagagcttcattgcagtgactgccattcagcaagaaataagagatgacttttaaatatttggccagattttatagtggcaaggacagagttttagagctgaagagccatttagttcaatcccatcaatctgcaaatgtgaacagtaagcccagaatcacatttagtgttagtggccagaagggagaccttggctatgaacatttaccctaccggaaactaatggcgtaaccagatttgaaccttttcttccattctgtactaggttgtcttttctttgttaggaaaagcctattataaacggaacattgacatgaattttaatttttgcatattttcttacaacatttgcccttactgcattttataactaattgtatatacttttatattttcctttttgtactcatgattctaatgtttctatgtggcatttctcacaatctctgtggggttttattataatttgctaaattattcccttgtttgggggcatttatataaactttttttttttttgccatgaaagagaaagccacagcaaacaatgtatatatgtagctctttattctctcaagttattgtttttgttctcatcatctgagttattgggggtgacttcattacagcagtggaaaacacatggtaacctgccagcatcagaaggtgtcgctttgtactgtgtgtgtgtgtgtgtgtgaaggttatgtgggtatgactgtgtaggaaagaaaaaaagtgctactctttgtagatcaaacaattgatgagtcttaatgtaggattacgtgttgcctgttaaattgctatttctgctgagaaagataaaggcatttttattagtgtagttgattagctttattaatgttggacaaaatcaatgttatgaaaatgaaatctatagttttggggtaaaataaaatttaataggtaggtgacccattcatacacttatgtgaagtaatttttgaaatgataacatgcatgaaaatttactatctatactaaatgtatattcaaagatattcttcctctagggttctagttataaacccttataaacccttataaaatactatgattcacatatacaacttataaaatactgtgattcatcagacagctctagtttcattttatctattgactctgatttaaattatcactcttttttatgcaggaatatgtggtaacaagttatatggtaagaaatttaaatgtaaagattttgacctaacgttgattcagattgtagagctgtcagttgaaaagggaaacttcatgtttagaaatttgagttctgctgggcgcagtggctcacgcttgtaatcccagcactttgggaggccaaggcgggcggatcacgaggtcaggagatcgagaccacggtgaaaccccgtctctactaaaaatacaaaaaaaattagccgggcatggtggcaggcgcctgtagtcccagctacttgggaggctgaggcaggagaatggcgtgaactcaggaggtggagcttgcagtgagccaagatcacgccactgcactccagcctgggcgacagagtgagactctgtctcaaaaaaaaaaaaaaaaaaaaattgagttctaaaatgtttgtgaaaaatttgataggttctttaataaatgtttatttccaacaaaaattttcctggtggaggagttattaggaccagtgagcatgcatttttttttaccgtcttgattgtattatcatattagcttcaagaaatgtttgtttcacgttacttatctttgtttgtcaatgaggtcagacactttcccccacgctgagaacagtatccactgcctctgaggtggatagtctctagaaatcctttccctgtcctggagcagtttgcctgaaagtgccatagttggtagcaaattcccttccactcctcttcctgcctgttaacactttctggaaacccaggtccccatgtgctttagcactctctgtaatcatttgtgggcctctgcagatgagcagtctgggagctgtggatgaggggctgggcaacttctgtcatgtgccattgctgtgagatcttttcttcaccagaatctgggggtgatttagaataatggttagttagtgacatgaagttttggaaagttttttgttgacatttttaagaagaagaaaaactgatgatgaactaaaataaagctgttctttcagccatgtctctgaaaccattgagaaggtttccaggtacattttgggcagtaaagaagatgtggactgggcattcctgtaatcccagcgctgtgggagcctgaggcaggaggatcacttgaacccaggaggtctaggccacagtgagctatggtcatgccactgcactctagcctgagcaacagaggaagactctctaaaaaaaaaaaaaaaaaaaagaaaggaaaagaaaacgtgccctgtttttctgttgttgagccttatttattttccttgctctcagcagctctgtggttccatcacttggctgccttcacggtgcctctgactagttttggaaatagaagtggtggtacaaacaacggggtggagttgcaggatacattgtggtgatatagtcttttcattctctatatttcagccaatatgatcttttcaaaacacaggttacattatagcattctcctgcttaagatcctctagggcttcttattacgctaagaataaaatccaaatacttggtcatggcctatgaagccgtatgtggctccctgcccacttccattcccactgtccatctaggtcctcaggattcccttatcaaactttcttcagttgctctaccacacatccccatgtggtgggttccattctgtactgtagctcttaactcaaacattagctctttagtgtggtcttatcttaccaaccatctaagtttgccccctttacttttttttttttttgagacagggtcttgctctgtggcccaggctgaagtacaatgaagaatatgattcactgcagcctcgagctcctcggttcaagtgatcctccagcctcggcttcccgagtagctaagactacaggcacgtgccaccatgcttagctaattcttaaaaaaagttttttttgtagagtcagggtcttactatgttgcccaggctggtcctgaacttctgggcttaagcgatcctcccgcctcgacctctcaaagtgctgggattttaggcatgagccaccgtgcccagccgctttacttatgtcttactctgttattgtttcctctgtatcttcttaataccacttataaacatctgaaattacccctttgtaaatgtatttgcttatttattattattttcttctgacttctttcattgaatgaaagtaagttccatgagagcaggaccttagggatgttattaactgttacatccccagcacctagtgctatgcctagcagtgagtaagaacattaatatttgttgaatgaatgcttgaatggccaaaacaagcccctgttatgtggcaggagctgtgctagcagtaaaaaatttagataagttgaattcagtctctgcaaacaatgttttccataatctggaattgttgtttggaattctttacagaaattcacatccaggctcacttggaaaaataatcttgctgattgtaatttttctcgttatggttgttcttggcagtaaagtcagtttccaggtgagaatgttactgctcttggccaaaggccactgtaaactttccagtattcctgagggtcttcaggccttactccttgaataagacagtgctccttgcttgaagaactaagttttctgagagtagaagggaacaatagaaagtgtacacatcagcattaccagtttattgttttctggacagttatccaaatttgcttaaggacttaattattaccagatcaaataatgttcccctcactttttagtctagtatatgctgtatgctaccctgtctgtgattctgatttcaaagtgagaaacaaattagcaagcagttgtttggtgaattttaaatgcagtggtgacccttgcccaatctttcataaaaattattttatatttaatgagttatatcttggggttccacaaatagtaggttcgatatttaggattaggtgcataatacctggagttaagctttgcagagctggaatttggactgtgtgtcttggccagaccctggaagcacaaggacaatgttgagatgaaaagattgagaatttaaaatctgtaagaatttaaagccattttacatcacaccataatttctcttcgctggattaagacatttcacagctatttataaaggagtgatttgctactataatttaattcacttgacaatcgtaggacattggatccatagttatgtcaagctagattagatgcaaaattggtaggaagacttttgtagattaaagacatatgacagtgaaatgcagaatttgagcttctattgaatcctagttcgagggaaatgctgtgaaggtcatttggggacaactggggaaatctgaaagttggactgcattagatagtattgaataaatattaaataacctcttgagtgtgttaatgatattgtaattatggaggacaatatgttccctttcttgttctttttgctttctgatagggtcttgctatatttcccaggcttttatagagcagtggtgtcatcatagctcactgcattcttgaactcctgggctcaagggtcctcctgcctcagtgtctctgtagccgggactacaggtgtgcgccactatgccctgtaaatttttttaaaatattttaatagagaccaggtcttgtgatgttgcccatgctggtctcaaatttctgtcctcaagtgatacccctgccttggcttcccaaagtgctaggattacagggatgagccaccatgtccggactttaaaaacattgttttccaatacgtcatgactattttgactatttgattggttttaaaatatctagttcattttcatgttgttccagatgaattcacttttatattgtatcagttgatgccatttcaaacttgaaaggtaaaagtagtcactgttcttcaaaccaaaatgactactaagaggtgtgcgtgtgtatgtcaggggaggtggagggaaattgtggatatgaatgaaaataatgagtgtaactttgatcacacagataatacatctacagcctttactaaagctgcctttacagtttctggcttcagagatgtggtaagtgcctcttgaaaggttgatatattacttttaacaacataaaaatgatatttgccttttttagagtctcttttttgttcactcagatttaaatgtatcatctaacagtcttctctttgtgcccatgttcttccatgagacacttagaatgtctaaaaagatgagtttggtattgttctagccttccctttgtttttaagggggactttgagtctatcaagagtgtgtgtgtcagctaagattgtatagctggctggtgcaggagctggaatttaatgttgtttttttctggcctctcagtacatcacattgtcacttaagtgagatggcaagcatttcaggtgctcttacatatatctgcaagcatggataacatttaatgccagctctcataattatgcatcacttgttgaattatttattgtacataccctactataaattgtaaactcctcaagggcaggatttttgtctgttttatgcattgcttttttttgtggtatgtagaactctgtctggaaggtgataggcactcaacaaatatttattgaatgaatgagtgaatcaaaatagaatgaactaggaatagattaatggctgctcactttgcaggatttcagggaaataattggtcagctttaacaacacatccccctctaactagctgatctaaactgaaaaattagacactggcttcctgtttaatttcccgtactcgtgggagtgataatacattaagctcacttaggtcagtgatttgacaacttagagtgaatgatttcaacaacccctttcctaggagcactttttgttgggggcagggaggacgggtggagtgctactaagttgaagaaaagtacagatggaaaggggcaggaaaaaagaaagacaaggagatgcaaagacaaactttgagcgtatcatgattttgagcaggacaactttgctggtatgtgggttaagaaatactttggaataaatggcatggtctgatctgtcaaacttgttcatggtcctgtggtcccaagaatctgtaccatgtaatttgtaactccagatagtcaagacttgaatttggtaactcttgtaattcttggtattgtgtatggatgctcatgtacagtttcaggagagtaagctgttgttcccatcttatgtgtggcttattatatcatgagttattactgtttgtcagttattcctgggtaacgctgttaagaaaatgctggcacttcaaggggtttgaggaaatgttgaggatcagatttatttaatatgtgcaaaattctagattaggtagaaagttgttgaaatcatggatctaaagtgaaaaattgagctttttagagcacctattagagatcagacaatttctagtgtagagcctgacacataagagttacgtaataaatatttggtgtgtgggatgagagggaaggagagaggaggaatgttgtgagcagctactcattgaagttgtgaatgcagccaagctgatggttccatagattgtttttctctatgttgaggctttaaatggtatccttaatttactgctacctttcagatgaatgcaactggacatcaagtagactaggggaagaagagtacatctgttttccctagagaacagggaccccccgccccgggccatggaactggtacctgtccatagcccattgggaactgggccacagagcaggaggtgagcagcaggctaacaaacattaaggcctgagctcctgtcagatcagcggcggcattagactctcataggagtgctaactctattgtgaactgtgcgtttgagggatctaggttgcctgcttccatgagaatctaatgcctgatgatctgaggtggaacaggtgcatcccaacaccatcgccctcccatccccaggtctgtgggaaaaattgtgttccatgaaaccggtgcctgatgccaaaatggttggggaccgctgacatacaagaagagtaattcaaaaaacagaaatagcaatacaaagttgcagtctgaatttgtgcatgctattttacctcttggtgcctcaatttccttatctgtaaaatagggttactaatgtatatttcattgggttttttgggtaggagtaaatgaggtaattggtaaaaaggagtttagatacagcatctactgaaatatcagccagtagaagtattttgcggtcaatttgttttgtatgtgcccagagggaagggaaatatgcttaccaattttgttcattgttaccgtctgtatagaattttgactatttgattggttttaaaatatctagttcattttcatgttgttccagatgaattcgcttttatattgtatcaggtgaggccatttcacacttgaaaggtaaaagtagtcactgttcttcaaaccaaaatgactactaagaggtgtgcgtgtgtgtttgtgtgtgtgtatgtcaggggaggtggagggaaaatgtggatacaaatgaaaatatgagtgtaactttgatcatacagataatatatctacagcctttactaaagctgcctttacatagtttctggcttcagagatgtagtaaatatccactggaatgttagctcttaaagctggtggtcatatttatataggttgggtatcccttatctgaagtgcttttgacagaagtgttttgggtttgggataattttggattttggaatatctgcattatacttataagttgagcatcccaaatatgaaatgctgcagtgagcatttctttggagtgtcatgttggtgttcaaaaactgtttggattttggagcattttggattttcgattttcagatttgtgttcctcaatctctgtggtttaaggctgagagaatagatctaatcagcagtcagtagagctcattagtagaggagagaggagagttttcttttaagaaggctatggggtcttgtgaagagacgagatagcttgtatttaattcacctgacagtcattagctagtaaaaatgaaagagagtctgggaactggaacagagagctggaaattcagctccttccaggcagatctgccttgaaattccggggaaatcagaacaggaacctcttcatttcttcatttcccttcactgcgtagtagtttattttgtgcttttggtaaaatgattcaaggtccaggagacatcctgaggtgatgcagtgtaggaaagcatttcagaaaggtaagatggaagacagatctgggcacagcaatgtgaattggacatttcgttcatcctttgggcttcctagaattagctgtgatccataggactgtcctgtccatcctggtgttctctcagaatcaggagcagctcactgtgcgaaaacccatctgaggaaaacaagaatgagctgatggtcactgtatcccaaattgacacactagttaggtagcccttgggtgtgaacttccttaaaatatttaaggaaagagactgctgttaacatactcagggaacaattatatgttgtttaccacatgacaagagaagaaataaacgttagacatatttctgggagcttagataagttgaaatatggaggaattaaatgctatatggtatgataatataaatcatttgaaagttgaaagttttgttagagctaagaaaggccttgaaaccatccgatctcaatcctgtaccttaaaaattgggaaactgaagctgaaagatgggcagtgatttctcccaaagttttgttgcaaaatacagggcttgtcttgatatcggaatactttctattctaagacattttttttgtctttaagataaccagatatgtatctgagggtagaacatacctcctctgtactatacctttgaagtttttgtttatatatatggtttgtgcatacttatgtaagtgttgccctcaaaatggaaaagattcaattaggcaagaatatcaggtgttgaagtcattttatccaagagctatgaagtctcatattagtcagttgggcatatcgtcttcatgacctttttgctagtgttcccatctgttgtatcattgctgattgtgtccatgtgagacggaaaaggagcattggactcttagcctaggaaccatataacaactataatttaaagcagatgttattaacctagcataaaagatgtgagaagtctgaagtgttagagccagagaaaaggtgagattaaactcaaatcttctgaatctaaaagccttgttccttccaaaataaagataagcatatccttctactggaaactttacagactggcaagagtaagaataaaaagagcaggtgatatatgattgattgtgccattattgatagttactgatctgttgcatagtaatggagagcttgattggatggtgatcctccctgtgtgcctcctgagtgtatttggaacatcatccaggaaggccttttaaagaagacaatacttggagaaggttttgaatgtttgaaaagaagcatgggccaggtgtagtggctcatgtccataatcccagcactttgggaagccgaggattataggagtttaccagtcctccagtgggaggatcccttgaggccaggagtttgagaccagcctgggcaacgtagcaagacttcgtctctacagaaaaatgaaaacataagccagacatggtggtgtgcgcctgtagtcccagctacttaggaggctgtggcgagaggatcgcttgagcccaggagttgaaggctgcagtaagctgtgatcgcaccactgcactccagcctgggttacaaagtgagacccatctcagaaggagaagaaaagaaatgtggtttcactagagttatggaatcaggttaaaagacagtattacctttaatgtaaattggtggcacatctctgcatcttagcctcaactcagaatattattggtttaagagtcagagagcttaggggtaaaaggctctaaaagcctctgaatttcaggaggttggtactttcagcggtctgtctccatctctcagcactacttcctctatgggcttcttgtggttcagagacaaagacgatgactgttctgcctgctcagcagtcctgggagagagcaaggctcatcgtttctgtgtccaacaacaatcttgcagcttccactttacagtcctcctttggttatgtggctattcttgactgattgactggatatatgtatagtcatcccactataccctttagtggggcgactctcatggccctctcagcattcccgaaactgctgggaccctgaggcaggtggggttaattcttcaaaagagacttcagctactgttaccaaagagtgaataaaagggctgaggtggcaaaaacaataatgggtttttgaatatatgttactaggctaggcacagtggctcataattccagcactttgggaggccaaggaggaaggattacttgagcccaggactttgaggccagcctgggcaacacagtaagaccttttaaacaaaaattagccaggtatagtggtgtgtacctgtggtaccagctacttaggaggctgaggtaggaggatcgcttgagcctgtgatgtacagtctacagtgagccgtgatcatattactgcactttagcctgggcaatagtgagaccctgtcttcctgtctctctgtctctgtctctgtctgtctgtctctctccctctctctctctgtatatatataatcccagtatgtttttatttctttctacagataggggaaggtgatctatttgaaagtctaatgcagaataaagtagtagtagttatcccctggcagagtaaaaagataagcaaaacttgggacgtcaacttacagcaagagctgtatggaagagaacagtgtggtgtgtagagagaaatcataaagctggctgctttgggccccaagaaagtctcgcttgtgatggttgtatacatggccgtgtggagcttcagatataagaaaagaattaagagatatgtattaataaggctgggcatggtgcatgtgcctgttgtcccagctacttgggaggctgagtcaggaggatcgcttgagcccagaagtttgaggttacgatgagctatgattgtaccattgcaccccagcctgggcaatagagtgagacattttttccatcagctcagtgtattaaattggttttctaagttaaaggttcacaacttcattatcgttactatgcagaattgcacttggtcctgaaatctgtctgaatttctgaataatagtttcttgtcctcaacttgtgtggtctcaggttttaaaacaaactaaggttgttactgccaatttctaaccactgttgcatttgtagtaattgagtgccagtggttggaggtttagagaaggtttaagattaactgattccaaaaatatctgtgtgtgtgtttgtgtgtgtttccatgttgtctgtgtgaatatgttagaataggaatagcatatgttttgattaggcatttttctttgttcaacatacactttggaaaacctagagaatttcagtgggattatagtatataatgactatattctgataaaatcgtggagtcttaacatttcgggtaacagattatctgctatttactggtatgttgattcgtggacagatgcttctctgtcttcaggtaggctccccaggtacactttcttgcagtcccttctaccaggtagacatgcaagaattaacaataaatgccacacatgtgtgttttctcttttttctgcttgtgagaggtgtttaaactttgtggaaatttattagaaaagatccattgtttggtagttctgatagcatcaactcgccctttatctttcatgatgcattgagacttccattactttgtagcgcctgactgctagaattgttcccagagttcaggggcttccaaatgacaatgggctgtaccgggctttgtggccttaataagccctctgttactggaattttaaatattggcatacctatcagagtctggccgtgtgtcaggagaatgttggctttagagccaccactgatggatcacatgtttttttctcaagagagcaaacaagcactttttgtttaggcttactaatgtttggcaaagaaatatagctgtaattatatatcctcgttcttgttactctctccccatctaaattttactctccctacccctaactttatataaaagcaactagggttggatctgaaataaatgtcatgaatgaataataatttctttcatttacacagtaattcaacctgttgaatgctgacttaatgctttactacactctaatttgactggaagatttggccttcgtgaatgcaaagaagaggtaaaaaatagaaattaaataccgactgactatgaaggaggacatttttcagaagggttctccctccttctatttctcatcttcttgtgtttgccccctgctttctgtgatacttaatacttaggagttgttccacaaatcattctttactttgtgtacccagcagtatcccagcagcaggattctccagggacaaggcctaggtctgccactgagggtagtctgcttccttcatcagaattgccgctgctggccttctggaccattagagttctttctggttgttatccacttttcattccttctcaacccatagaattccaggtggtgagtcagtttttctgtatgatcatgcttgacaccccaaaatctacctgaaagtttgacagatgcatggaagccaggagcattttaggaagctgtactgctcttctgagattttctgcctacttactgtctgagcattcaacctgtctctctcaaattttctctttctctaaggtgggtccagtaatgcgagtcggcagcccactttgctgttcttggaagcgaagtactttccaatagaagtcagttttaatcttctttcaccgtgaggaatgaatgaccattttaataaataattcattcctacagttcactccgtaaggagcttctaagctccctccatgatggtttctgatcctgccagggtactgctattttatctgtcaaatgtgggttgttagaggtactgtgtcataagaggcagtgcagttcggaaccctggaacccccttcataaatttgcaaaacacagtgcatggggcctgctatggcaaggtatgctacatggagcctcagctgtctgctccctctcttctgtcagcacagctagcagtcagagacaaatggctaaccctctttgagtctcttggagtaaagcctggttgtgttctgcgtggattgcatcctgtgcagattgtggatagcaagggcttccttgcaggcctgttgggagcattgattgagatcatgggtgtagaaagcctggactatagccagagtcaataattattagttctttatcttgagacaaagggaagtgttaaaatatttttatatcaaggaatctcctacaaacactgtcctccccactgcccactgccagtatttacatgaattaattttctccttatcttcttactctcgcccacccgcttccctttccttccgttccaaagttatactacacttattcaggatagaaatttcctttataaaaagttgtaaaaacttcaaagtgcctgttgtagtatatatctttaataaatactcccctgctatatttgttaaactataattatgagcatacatttcataaaaataaagcccatttactcataaactgtatgtttacatgaaaaaatacacattttataacccactccagacctactaaatctgggcgttagaatctcaatcttgggttttccaacctggctcctttttcgaaataacctggaacacttaaaaaaaaaaaaaaaaaagcaaactccaggctcaatcccagatgatttacatcagcatattttcagggttggccctgggcatcatttgtttaagcttctctggtgattataaatgtgcagccagggttgagatttaacggtctatcctaagtgcttcttaaggtctgaaactataactattaagtgagctggcttaatttatttaatctttgcagcaaccttatgaggcacagctggcattatccctattttcagatgagaaattatagaggcttggagaagtgtgaggtaataataccaagaatgagagttacttgttctcctatgtcttataatcaaatagtatatatagtattaacatctacttggggatgcaataccttttcacgtgatggtcacaatctatgtattacacattggttttggcatgaaattaaactgaccatctcaatatgccttggaaccaagtgtttgtgtgctgaatccttttgaaatatagacacctggtgtgttagtccatttgtgttcctataaacgaatacctgagactgggtaatttataaagaaaggaagtttatttggctcacagttctgcatgctatacaagcatagcaccagcatctgcttgccttctcgtgaaggcctcaggaagtgtttactaatggcagaagggaagggggatccaatgtgtcagaaggagcaagagagatgccaggctcttttaaacaaccagctctcacgtgtgaactcacagagggataactcactcattccccctggagaacaccaagccattcatgaagggcccacccccatggcccaaacacctccctatgcccagcttcaacattggttgtcatatttcaacatgagatttggagaggacaaaacatccaaatcgtattacctgcaggttgacattataaattcattttgttaaactcagtggaaatgagaatcaggttgaaactcggggtttattactgacttataaacccaggtgtgctttgaatgcattggaaagcaggagcaatttaacattctgtgatttttagaggtttggcagtgaaaccctttggtatttatttaataaatcctgccttcacagtcatggattctttttgaatacacccaatttctcctgcttcccaactcttttttcaagtgactttgttaccaggtaccgttgttgcagaggagtgatttgattattctttctctgtagaaatggtgatgatgtggggcaaatctacctcaaactgtaaactatactcactttttccacagatggggtcttgttatgttgcctaggctagacttgaattcctggacccgggtgaccctcctgcctcagcctcccaagtagctgggactacaggcacatgccaccacacacccagctatattcacattaaaaaaaaaaaatcatctgtaattctaagagctccctgtgtggagccttccaagtggcccacctgtgtgggaaagctgccctgcaatatgggcccaaaaattttccttggttttcatgtatctgagcaagttgcttaaaggtgcctggttctgtgtgtttgagattatttattccatttttactaatagtttagagaaccatgattgtgcatacatgcacctgtttgtttagtaaatatttattgagctcctaacatatgtcatgcattgttgtaagtagtattgaagttacagcatccaaaccaaatagacaaaatctctgcattcgtgaagctttatttaatggggaatatagaaaaaagtataaacacataaatcttaaaagtattttggaaggtgagggatactatttagaaaaagaaaacatgtaaagaagaaatcccccttaccatatttggggaatggtaaaatttttaataaggtggttagggtagacctcactgagaagatgacgttaagcaaatggttgctggaggtaagggtgtaagctatgtggatgtctaggaagaacactgcagacagaaagcactgccagtgtcaagttcctggagtgtttgaggctttagcgaggaggtctgagtgctatgtgatatgtttactacctacctataagagttttatggatttggagaagttttctctgcaatatgaatatatagtctcacaaatgaggataaagtttatagcaaattatcatggatttgattatgtcatggcacttgaaggaaagagagggtgggctgtgaaactcccttaaaaataacccatttttgaactcgacataaattttcagggtcctataattttcttatcaggagtgtctcacactgattgctaggtgtagaaaaatgtatgttgcctgaatctgaaggcatggattgtaggcctggttataccacagttacttgtgggactttaggaaacatgcttcatctggtcctgcttctgtttctgctatcttacaatgaagataattttccccctactttttaaacttatttgcagtgaagactagataaaaaaggatatgactaacacattaaattctgaagtaccacataaatatgacttatttttgcaaaatttaagagcacagaatgttggttatcaaagagtgtttaaaatgacctttctctgttttttgtaagtgttgtttgagagcacagtgatgaccacttaattcctttcctggagcaagacatgtttcttgtgggtttgatttgtacattatcactgaaaaacttcatcagtgacaacaacaaaaaagcccaaaaggaacctaatgaaaatagtagtgaagttttacacattacatagttacccccctgccacacacacacacaaagaacgaaaaaaagaaaagaacttggtgaaatatggtactttatattttaaaaggcctaaatcttgcttgtggaagtgggctttagaaagtttgcagcttttgagttatggagaggtggtggaagatggattatctggaactggatggaaagttgttctaccaggagtggctcataatgcacttggcaaaccgaagtagctgtggtggatgtttgaggtgtgtgcacatgtgcattttgtgtatccctacacagcttaattcgactggatgcagttttctgaattcacctgtttcttgcaggtgaaagtgcacacaaacatgcaagattcacattgtgctcaaagtgttcctgctatgtcaagcacattgaaacaaatttatgttttcaaagtaagctttataacagagctgtctgtacaggggatgattcagtccgatacagtcagggaaccgtacatagaatagaatgactagagtataatctgcaaaggatggaatggcagaagtagtcagaagaggtatgcaatggttggatcaaaaagagctttgtatccagcgtcacagggcctcaaattgtactgtaatcatatgtcttttacctgttctctggcatttaaatattcttgtaaagagctaagccattactgataaaatgtctgttgtgtacagttgtacaaattaaattcagtcacaaaactgaaagaacagcagtgggacatctatcctagtgaaagttagaatacacttttgtggtctttaataacagagttgattgtttaccttctcctttggttagaagactggtatggggattgtttggaatgaagaggtaggagagagaaataattcaattctgtattctcccatcatctttatatttgaactgagaaatgtgtgtttctatcattcattcaaattattaaacaaaaacagagatcaaaataataagaacagatgattaaagagagtcccatctgccccatatccaacctttctctcttcaacctcatttctactcagattagcagatggcaccagttttgggccatggtctctcattttctgattacaaggggttgttcttttgcccgcctcctttaaaacaacaacagaaaaattggtaatgactgactgtatgcccattggccggggcaccaattcctgaggactagacagaagcttggcattcaacccagccttctgccaggatggttctgcctggcagcaaaaagcctggttgaattaagcttgggcttttagatcctagaagtcttgtctattggtggctggaaaaatagctagtactagcagagcctaaaaatatcagagaaaaaaaagcagaggctcttagaagttgcttttcctttttgtttctttctcagacagagtctcattctgttacccaggctggagtgcagaggtgtgatctcagctcactgcagccttgacctctagggcttaagtgatctttccactttagtctctcgagtacctgggactacaggtgtgtgccaccacgcctatctaatttttgtagttttagtagagatggggaatcatcatgttgtccaggctggtctcgaacacgtgagctcaagcgattctccctccttggcctcccaaaatgctgggattacaggtgcgagacaccacacggccaagtttttttctgataaagactataaagggaaggtagggaaaggtgattattgccaatggtggttggtatagtgctgagtgatacagaatgcaggattcatgaattctaattttgcatgtgacctctctgtaaaggaaaatgaccctctaactaaatgggaaagtaaggtttcacagatgagatagaagttcaaggtgaaagaacagtctataaggtaatacctgcctgtctgcagagaatggattcaaggctcctgatgcaattgaattatagcctcattgtcatatttttttttttttttttttgagactgagtttcactctgccaccaggctggaatgcagtggcctgatctctgttcactgcaacctctgccttccaggctgaagtgattctcctgcctcagcctcctgagtagctgggattacaagcacgcaccaccacgcctggctaatttttgtatttcaagtacagatgaggtttcaccgtattggtcaggctggtctcaaactcctgacctcaggtgatctgcctaccttggcctcccaaagtgctgagattacaggcgtgagccaccacacccggccttcattgtcatctttgagttaaatgcattttggctttaataaaaacaatatgagtaaattctgaacctataatttgagtcccaatagtatttcctaacaagtgatataagtaaacactgagaaaagagtatagtgcttacagaatgacagcatgaattcagcaattcctgtttagcaagaggtctgggccaataacttggggatgtcatagacagaatgcatttggctttcagcaaaatttttggtctgctctcccataatctctttgtgaacaagtagaaaaatataggcggggtggcattatgattatcagtattcataattaattttataactttttccagtggtgattaaattttatttcactctagagatgactttctaagattatcataaataatctatccttggctctatcttatccagatttttgtcttagactaggatgaagatacaattttaaatggtaccaaaacttcttgggtcataaatatggtagatgggaggaacaggacacatatagattttaactcttttggcagtggcgaaaataagatttgctaggactaaaagtgtgattatgtttgaaaatccaactgtgaaaatagagaattgatagagatgagacttacgatttttagacgacacttacagtgagtcagcagcatgtagttagctggcaataaagctaatggtattttcaagtaccttataaaatatgttttatgtaccggactgtactttgtatttggggaagaggggatagaaacattgaaggtaagatttgcccagagtcacagatactgttaatgttcacattcttcacattttatttgtacatcactcttagtctttaaaatcaaaatacctaaatagctgtgaaaattcagtggattaaaagctactttgggaaagacagtaaaactttattcaaatagggattttcatataatgttaattttttgaaaaatcaacaattttaagaaaaaaataggatatatgaaaaactagatagttaagttgaagtttgagcatctttcaaagagtagggaagtttacatattgcatattatacatttaaaaatcagttccagacatatttttgttcattcatatatatgaatatattatatatgactatattatatatattcatatatattatatgaatatattatatatgaatatattatatatgaatatattatatatgaatatattatatatgaatatattatatatgaatatataatatattatatatgtgaatatatatattatatatgaatatattatatatgaatatatataacatatgaatatataatatgtatgaatatgttatatatgaatatattatatatgtgaatatatataacatatgaatatatataatatatatgaatatgttatatatgaatatgttatatatgaatatatataatatatatgaatatgttatatatgaatatatataatatatatgaatatgttatatatgtatatataatatatatgaatatgttatatatgtatatataatatatatgaatatgttatatatgtatatataatatatatgaatatgttatatatgaatgtgttatatatgagtatctataatatatatgaatgtgttatatatgaatatatataatatatatgaatgtgttatatatgaatatatataatatatatgaatgtgttatatatgaatatatataatatatatgaatgtgttatatatgaatatatataatatatatgaatgtgttatatatgaatatatataatatatgaatgtgttatatatgaatatataatatatgaatgtgttatatatgaatatatatataatatatgaatgtgttatatatgaatatatatattatatatgaatgtgttatatatgaatatatatattatatatgaatgtgttatatatgaatatatatattatatatgaatgtgttatatatgaatatatatattatatatgaatgtgttatatatgaatatatatattatatatgaatgtgttatatgtgaatatatatattatatatgaatgtgttatatgtgaatatatataatatatatgaatgtgttatatgtgaatatatataatatatatgaatgtgttatatgtgaatatatataatatgaatgtgttatatgtgaatatatattatatatatgaatgtgttatatgtgaatatatattatatatatgaatgtgttatatgtgaatatattatatatatgaatgtgttatatatgaatatattatatgtgactatatattatatatataatatatatatgaatatatattcatatatatattatgtatgaatatatattcatatatatattatatatatgaatatatatgtgaatatataatatattatatatatatatatataaaatgccataagccatagagattcagaactaataaaaggcaagttgcttgctcattaaaagctaataaactagaaggaactacaaaaagttttaaggttaagggatgcaaaattgattagcaaaggcagatcagaaagagtttctgactcatgcttcattggtgagaacagcaaggaagaactgggaatgagaatcattgagttttggccgacttagaggcagagtgttttaaaactgctttttggggccgggtgcagtagttcatgagctgggggaaaaaaaattacttcattttcccacctcagtttcagtttcctcatctataaaatgagataacaacagcgtggagtctacacatgaattaatgactttatttatttatttatttatttatttatttagagaccgagtttcgctctcgttgcccaggctggagtgcaatgacatggtctcggttcactgcaacttctgcctcccgggtttgagtaattctcctgcctcagcctcccaagtagctgggattacaggcacctaccaccatgcctggctaatttttgtatttttagtagagatgggatttcaccatgttggccaggctggtctcgaactcctgacctcgggtgattcactcgcctcagcttcccaaagtgccaggattagaggtgcgagccaccgcgtctgactttgaaatattttttttttaagattacacagctaaatggaattctctaggaagcacatccagctgctgaacctgtgatatttttttcttatggaacgttgattgaacagcttccatgggtgacctggtttggatttccgtagggccttgcttataatgctgaatacactgttagtttttacttttgtgtcacaaaagtaaaggttcatagttagatctaagccccttgggggacaggaactgtgttctattcatactttgaattgctagtgtctggcatgtagtagtgattaatatattttttaaaatgaatgtcaagtattatgacaggcactggtacagaaagatcaagaagaaatgacctcttcccttgtgagaggctcactattgtgatagaccaacctctgaacagaggaattaccatctagggggctgttataacaggcatgtgctgttcgagttcaggggaaagatgcacttgctcaaagagggaagtttgggaggtgtacgggaaggaggaacccacctggatcttaaaggctgagctggctgctgaagaagagaggggcacttgggcctggtcaccagctgtgcaaaatcaacaagggcaaggaagtggctgatgaagcctgaaacagggagattcccaaatgtgatctgtgacctcaaaattgaaaattttagttagtgtaattttagtatattttatgtgcatgttccaaagttttttgaaaattggttttatatgtttagcatatggggcaattctaaattagtatatttgattaacgttgtatgctagtcctttgaaattctgcagttggattgtgtatatattgtgtataatgttacctcttttccgacttcatgaacctaacatttaaagtggaaacaaatgcacgcatgtgttagtgtttagtgcagcaagaaagcacggcccaccacttccaagaagtgagtcgttgcatagggtgccccgtcctcagaacattgctcattgttcattttttattcctcagctccttagttctactcaaagtctaatattagtttaactaccaaatggcagaaaccagagtacgttgtacatttttcttgaaggatacaactggaaaaaattttgcagaggctcatgtgatgctattttccttccgtggtgacacttagaattcgtttcacattgcctttgagagaaacgaggaggggggagaagcctgtatttgatagttttgtatgttcctctaaagaaagagagtgcttgaaaaaagaaaggcaggctttcagatgttgtctgaacaaagctacggaaatgtgagacgagagcagcatctggagattttcaaacactggaacatgggctgcacgtttcttttgctgttggaggagtgaaaagctgtttcctgtcatttcccatcttgtcacttccagaaccaacatcttgctacttcttgcaccagctgctgctgctgttgttttttttaccccctccacagacagatggtaaaagagctttgataatcctcgcccaacttccccagttctaaagaagtttgcggtgtggtacctttatacaatgatcacatgccctgatacctactgtagcctgttaatagagttgggaacagagcagaaggatgtgctgcagacttttaatgtctatggcattctttgtcatgtctcatgggaaatgctgtgcacaagccccatctctgtggatgcttcgatttagcttctgaggttatatttagaaaagaggaagttgtggggagtacctttgcttccataagaatttgagatttctgatcaagatttctctgtacattgaatccaggatgggagttgctcttgatattcttgttcgtatccctaggttttcgcaaagcagaattaggcatattggatataccatcttttcacagggctgtttatccttaattactttttttacacctatttcttccaatatttttcttgcattacctagtgcaaacaggaacttagaagttaatgcagaaaatgccgtatgcataggaaagatatttgatgcagacaaccttggttttgttttaagttttattacctttattattacaaactaaaaatgataacctcaatgagggagcttagcctttctgtccccccctaaatcatggttgctttcctaagtataaaagtaacatactcattgtagaaaactttgaaagtagaaaatctattacagaaaatacaaagtcatccataattccttaataaccactcttacatttggtatatttccttgtagcttttttttagagttatgtgtgcctgtatttctcttgtatacttataaacttacattaatattgtggccattttccagaatggatctggtggtagtagtagtggtgatgataatggcataacctaaaatttattgaacatttattatgtgatagtcactatggtacgtgctttacatatattacacatttcatttctcacatcagttctataaagtaaggattatttatttttattttagacatgagaaaagtgaggctgagaaacatcaagtaattttcccaaggtcacacagtgcgcaataggtgaagctgggatttgaacccagatagtctgtcttcaaagctcatgctgtttgtcatttgctcatctatgtttaaaaggtctgaatattttttaaattattgatacatatagcctaagattttctatttattcagacttttcagtcatgagagtacttactgcgctctcaccatcttcacatatcatcaaatatgttttacctttataggtgtttggggtgaatgattgctcagtttttacattggcctttcttgattactagattgattgggcattttccatgtgttattgatcatttttatttaatctataaattgtttatgttctgtgtggctgcttttgttcaacagttaatttttttgtatacaaaatcatcatgtgttaagtatattaactctatgttgtgtttgtttaaaacatgtctccttctgttaacttgcttccttatatttgaagaaaattgtatgaatgttttaaatatgtacatattcatattttttctttataattctctcccacaaatcagttatttagcctatgttttcctttattttatggtttttactatttataacaatttttaaaatcaaatctgaaatttattttaatatatagcatgctatgagactttgaatttattttattgatgggtaatactttttgtttttgttttgctacttcctttaaaaaatattatgcattatatattccactcttctgtggtggcattctttattatatatttgtttattttgtctaccagcgtctcttcaagcaatctttctgtgtcagtggcctgtgtatgggtatgcctacagacattttatggatagtaaatttgtaaaatgtgcaagaagttttttgtcttaaaagcacccagactcagcatcagaaggcccatatccaaacctcagtataacctcatgattgacttgtgacatgaccgcatgtaggcttaaatgctgtcaggaaaattaaaggaagtaaaacgtgaattgagaaatttggagatttctgaaaattttgaaaattgagattttgctgttaatatcacagccgtatcactaaaatttccacaatcctttgaatttgtgaaatctatataaacatgatttaaagtacttatgatattgtcctttttttcatattacccaaagtatggaatttgtggcaaataaataaccaggtatatatggcccatatagatatggtttttatcctgcacttcttttgagatagctgggggctttactagagagaagaaataaaacaagataactttggcaagtatagatgaagtttgagaggtgtcttatttcattttgtgttgctataaaagaatacctgagagtggctcatggttttggaggctggaaattataagagtatggtgctggcatctggtgggggcttttttgctgcttcattccatgggagaaggtggaaaagcaagagagcatgagagcaagaggaagcagaactcactttaataacaacccactctcgcaataaccaacccaactccagtgtgaatgacgttaattcactcatgaaggcagtgaccccacgatctaatcacctcctgtttggccctacttcccaatagtgttgcattggggattcagtttccaacacacaaactttggggacatggttaaaccatagtaagagggaagtttaacatttgtttaacgttggtatcgaaaggaactatttacgttgcagccccgaaaagactacaaataatattggttaaaatagaagtgggctgtattcttttgccattgcagcaagccttagtagtgacctagattcaaaatgttactttgattttatttaaagcactgaagtattgcatttttcctcgtggttttatgcacctactaagtgcagctaccaatgacaaagatcttctataataaaaatgatgtttccttatttttgggtcttttttcaatctgaaaaatgtttctttaatcggattctcataataaccctatgcagccatataatctatggtattattatctccactttgtatatcaggaaaatgagactcatgctaaaatacttgcccaaggtcatatgacttgaaatggtgggactagcctctggcttagctctagtgagacctaaaataatactcttttggtttggtgagttccatcctttctttttttaaagaatttgcatatctaccttatccacttttaaaatgtttaaagaatttatttcaggtgcctgtccagagtgacacatgtcaaaatgttttttaaacagataagtactattcaaatacaaggctttatctttcttactgcctggggtaagatacctgtcttccctgtcccaagttatatgatgcttatttaaaaagttacctgtgagccttgcttattaaagtatgcctcagctatgtcatgaggatatttttttttaattaattttttttgagacagggtctcattctgttgcccaaactggagtgcagtagtgtggtcacagctcactgcagccctgacctcctgggctcaagtgatcctcccacctcagcctcccaagtggctagtactacagtcgtgtgccaccacatccagataactttctatttttggtagagactggggtctcactcttttgtccaagttgatctcaaactcctggtcttaagcaatcctcctgcttcggcctcccaaagtgctgggattgtcagcataaggcactacgcctggctgaggacatttttaaaggtgtatacttcaccatattctcttttcctctacatgaagtttagcaatgttcaagatggtggccactccatcccccttgatgactgagtgactgtgatgagccgagcacctgctgactcacaacagccatagagacataagagtgtgaacaagaaataagcctttgttatttttagccatggagattttgcagttgatactacagcattatgtagcctatcctgaatgaggtaggatcataataatatgtttgttatgcatcacacaagtttttgggttgtttcaatctaaagatctgaaattatacccaaactagatattctccagtatcaccaaacaggatctatccattctacagtgctcaccagattgcttctgtcatacttcacctggacatctgtggattctggatattagaaattggaaggaaaagcttgtaaggggatctcagtgcccagggtcaaagcttcattgttgggcagccaaggaagagatttgcttgacttacttgagtaatttttgacacatacttgatttggtcatcaggcataaaggatggccagattactagtaacttattggagatacacttttaaaataggagttaaggctacttatgtgttgatctgaaattaagaaaagggcaagatttctccctgtggcctgattttcaaccatgactaaataaagcctgaggggagccactgaggatggaaaaggtcactcagtcttttttgctgatgaaaaaatcgagttgtctagctctggattgacatccagcactgacatgctttaggaaacaaatcttttgatggcaaaactctcactagcctcacctctcctctcctttcctctctcctctcctctcctctcctctcctctcctctcctctcctctcctctccctcatttttcccttttctactctcccacttctaccctcatttacttatttctcaatttagctcatcagggctttttgttacaaaaaaatggtgtgtaagttacttagctgtaacttggaaactgttttcccatgaatagatgacagaattactacatgccaaattatcccagaataggtggcttaaccaattgtataattaagttactttaataattaccaagagggtcctgagccccatggaaaccttcactgcttggaggatgtataaatggaaggtgggcagcatgagtcttttggactggtggccggaacaagcagttcttagctttttttaaaatcatctttcatatttcagagcaattctttgcataatccagattgcttctgtcatccttcacttgatcatctgtggattctgagcttcagggtggccatgcgacctttcagcccttgctgtggaaggtggagctcctaccatctctgcctgtgttggggctagacgaagtttccctctgactgcctcaatcttttcactgtcatgtgtcctgggagcctcctacacagtggagaggagggagtatgagtctcaggaaccattgagttttttcactgtgaggtgggacaggcctaaatttctccccttaggcctgccattcactgagggtgtgcagtcatcatgctaagttctctttcttgctccattttcatcttcactcaccccttactttctgcaaagcgttgatggtgttgggttctgacagttaccagttggggcatttgtgatctgtggagaaggcagagatagttaatgagtaggcacatttgctaacctccttggacaggaataagttcaaaggggtggacaagcaggattggctggaggaggcaggtctccacattgttctctcttgcccctgggccctggcgtccagggtaatttttgtctgcctttgtggttcatatttttagctctctgtaagaggcccccttggtaaatatgtcagttcattgttaaacctagacatgagtttgacatctattttgtgaaacaaaccatgtaaaaatatgggtctttatggtgttcagtgttccaaagtcaggaattttttagtttcttttgtcttcacttcttgttattctctcacttgctttacttcttccagccttttccttttccacctcatctcctgcttcttatttcctcatctctttttccttaccattttttcctcttccatttctcccttgatcttttcattatattcaattcatttcattcattgaatggtgttagaagaggctttgtctttgcagtcagaaggctcaggtgaagcttcatatttcaaagcacactatgctgacactaagaaaacatcttgcccgggcacttcagttgaagaaaactatatgatgtgatcagtatgtgatgatggcttttcagatcagatagctgggttgtatttataatttatttctcttatcagtgaaaaagataaatgataatgtagtaacaggattttctagagtttgggttgtagagaaataagtgctcatgaataggaccgcatatgtgtgcatgtatgtgtgttttgggggtatggagaaagaggaggaaaagaatattttatagagaaaatttccatatggttaccttttataggatctagcacatttcaatgaaaacacactttgctggaagaattcaattctctgtaaagtttggtgcagcaaggggtgaaaatgtggggacacagctggaaacttatttgtgctgcaggcttgcagctgtacctacctgtgatgcgatgaatactatttgattgttaatgtctttctgttactgaaagcttgcttcctttcctaaagctgatggtaacaatttactgactgtctaaaccttgaggactaacttgggctgggaaaaataaatcctgtctcctgaaatttacatcttattaaaactcaaagcagccagcagagatgagaaggatctccagcctgggagctggaggtgggaattctgctcaagtcaagatcgcttttagctttcctacattctcctgtgaagaaccattggattgaatgatggtggcaaaactggtgtgacttcattcagtttatctctatcccatttcccctctccacatttgactgtcagtctactaatgagacccagttatggtccttggaaggggaaatggaaggtggacatagctgtgggggatgaaatggaggagtttttaatatcttagcttgcaaatttactgtctgccatagctgaagaccatctagtaccctctttaacttttgccactttggagtttcctctctaccgttacttattcagcaggtttttgtttttgttttttgagacggagtctctctctgtcaccaggctggagtgcagtggcgcgaactcggctcactgcaacctccgcctcccgggttcaagcgattcccctgcctcagcctcccaagtagctgggactacaggcacgtatcaccacgcccggctaatgttttgtattttagtaatgatggattttcaccatgttggccaggatggtctcgatctcctgacctcgtgatccacccacctcggcctcccaaagtgctgggattacaggcgtgagccaccgcgcccggcctcatcagttattttttaattggctgtgttttctttccctgtaaacacacttgttcagaaggaaatataatatcactataatgagcagaaggcaagtatcacatgccataagaaagtaactataaaaatgagtgtaatacaattaaaatattatgaggctctagttagatactgttccctatggaagattccgaacttgaggcctgcactcacttctgtctcaagtagaaagggagcttaaagaggcatacactttacatctaaggaagcactaagtgaggcattgttcttaactaattagacagattaaaaaggaaaggccaaaccatgccattgtcttagctcttgttttctttgattttgaagatggaaaaagagataacacttaaaaataaagcttgcctactcagacataattaaggtattgtcattcttttttgtctgtcctggttctcattgcaatattttgttcactgctcaatgagtatttattaaattaatgaagatttcaatgttaatgtctagtttcatttgcccttcctctaaaggctgtattctttttttgctcttgctctctgtgattttttggtagttctcttttatgtgcttactcacacatgagtgctttctctaacacactggtcctgtgttttgcttctttgtgtgcattcacgtagacatgcacacctcttcaaatgacacatgcctgtaggcaggataacaggttgagttgtcttgttaattaggcattctttttctggggctggtacaggatgtttgagaatactgtcccccagaatactcatctggtacactggaactgccatggactagttttccagggcttatacatacaagtggcttccaaaaaagcattttcagacaagctgcttgttatgtgaatgtgtttttctttttagtcaaccacaatatatgcagcacaaagctgttgccattttcttggaatgagaaaattatgagcataatgtttcttttacatctctgaaaaacgctaatatccagctgttgtggtggttgcagttgtcagttgctttttgtaacccgacaacactgtctcaaggatgaagagaggaaatttggtgactagtctttcctgctcactctcctgaaagtcctattaatttgcttttttaaaaacaacagccaagtatctcagttggagaaggcaaagtcttattggtccttatattctgtgcttggattagtatccacagtaaaccacacacattttgttccttgcttaacgtgagccaggtgttatactttaaagacataatctcacttagtcctcacaaaaactcagtgaatacatactatcattagcaccatttttacagatgccaaaacaaaaaattgaggttaaataattgcacaaaatctggcagccattaaatgactgagctggaatttaaaagcagatgtgtctaaattctgagcttacatttgtaaccactgtatataatgtagtataataacttccccaataattgacagagtactttactcagaggctttacaaggacaataaaagaattagttgagataacacaacccatgttgtgagaagattgtctttttgattcacagttcatgcaaagaaataatatacagcagactgtgaataatacacaaacgaaatgaaatttcattcttgaatgaattatctgtatctccttttaagaaaaattggtaaagcatttaactggtcatggctcagggaaatgtctctattctgtttctgtctgaattttattctttaaatattcactttttttttttttttagcatccagtggccacctagttgttgttgttgttgttgttgttttttccccctgtgcttatgcttgtgccttgcagggctgcatttctgcttgctgtgaattctcagttcacagctgcagttgttcaaactttaaatttaaaattcagtctatgtttctagtaattgctgctgggaaactgaaacaggactacttggtttcagagtgaggctgttgcttcatattggaagaaaggtttcattagcttggaaagcaaatctcgggatatcaagaaaacaacaaaggctgtaaattaatgcagaactcaccctaaaaagggtcaatgatgaaagaagggagaaagaagagacaggagtttcagtggtcaagggaatattttcttcatgataacagtgacctgaattggacagaaagcagaagggagtgtgtcattttaagaaggtcagtttgacagaccgcaatattccaggtttctattattatatataattgacattgttagctaagggatggattttcactatttccttctgtagtacctcagtcccttttaagtaattttttttttcctgacttcaccaccaggatcgtgtgatggtttaggaggagatttgggggatagagaggtgattctgaagataaacccactttggctgcctctgtggtctaaagccagtttggagagcgcactacagaaacagggaattcacaggggatgagtcagagagagggactggagcagtttgtcttgtttcacttgctcttatcacacagttcactcctttctgctcatacattgtgtagtccaccatggagagaaagggagaaggttgcacaatgccttgacagatttttttttttttttttgaaacggagtcttactctgtttcctgggctggagtgcagtagctcgatctcagcttactgcaacctccacctccccagctcaagcagttctcctgtctcagcctccctagtagctgggattacaggcatgtgccaccacgcctggctaatttttgtatttttagtagagacagggtttcaccatgttggccaggctggtctcgaactcctgacctcaagtgatccacctgccttggccttccaaggtgctgggattacaggcgtgagccactgtgcctggcctccttgacagactttttaatgattgtagggatagagaatggtatacaagtaaatatactactactgtttttgaactggcacagtgatgaagactaagccagtaatgctatgaaacttcaagtattaaatttctaaatatttggcattaggcaccaatctaagttacagtttaatgcttttcatcacttgtaacattaccaaatcagaggaatgaaataatatttatccaaataaaagatgtgttaacttcgccaaagtgaatgcacatttttctttgatttccccataatacatctttctttttcggggaagacagaggttgggaatgggagggagggagattattgtgaatctcagattatattgatcagaaccaagtttagcttgttctggtatgtaaattagagatttgtagttaagtgaaattgattttgctgagactaaattaatcacagtccttaatcactgtaacctttaaacattgcagtcttggccacagctgcagggcagagcagtgctcctccgagctttatgctgtcatttcatgaaaggctgaatgcccgtgacttgtgcaaacaagaattcccatgtacaggcttcagagctggttccctgccctgcaggggatcagctggagcatctcccacagggccaagaggctgctgtggcctcttcaacccaagaagatgttctgctcagacacaaatattttcagtcttcctccagacatcatcaaactagccatcactgcgaaatgctcacaggaaagtagttgttagaattaaaatcagaaacaaccagttatattgtgatagttttttctttaattgtatatgtttatgtatatttataaatatatttatatttatagatttcttttatatatttatattatatttatatatatatgttttactgatcacattttgaactatttggaagggtgatgttgacaattttgaaagatagtgaggcatggagaggttaattgactcttcagaactaatcctgagagcctagaaggagggtcaagaatagaaactgggtttggtttggttttgatggtcatttcagttctttggtttccgtttcatgaagcatcccagaatcaaaccatcattaagcctgccatagaaatgcaaattactttcccactttagttggcatatttgaaaatagttttgtgtgattttttttagccccttttgtagtctattcatgaagtttatacatgtaggactcttttttttttaacgcctttaactaccaatcctccatttttcctttaacttttctatattcgctgacttttatgttcagttgaaggaattcatacacattcagtataataaagtgcagctggatcaatcatttaaaaaaatcagtgaacatctgtatttcacaaaatcacactttatcaggactgaagggtataccaggatctaacgatcaacttcaaccactcagttttgtaaatgaagaaaccaagagtagttaggtgaaatagctttctcaaggtaatttactatagccattctgaggctgcaccctagctaatttgattcctgtttaacactcttctctatgacattgactgttttctctgtaaaagagatcccggttatacaactatttcacaatccgattccttataaaaaagcaagtagtgctcaataaatttgacttaagttgtactttataagctaatgtaaaaggagatttaccataatctgccgtggtgagttgcttatagtaggagaaagaatatcttaaaacttactttacaaaaaataacagatgctggtgaggttgctgagaaaaaggaatgcttatacaatgttggtaggaatgtaaattaattcaaccattgtgaaagacagtatgtcaatttttcaaagacctaaaaacagaaataacagtcaactcagcagttccattactgggtatatacccaaaggaatataaattgttctatcataaagatacatgtctgtgtatgttcattgcagtactactcacagtatcaaaggcatggaatcaacctaaatgcccatcaatggtagactggataaataaaatgtcatacatatataccatggaatactctgcagccacaaaaaagaatgaggtcatgtcctttgcaggaacatggataggagctgtaggctattatccttagccaattaatgcaggaacagaaaaccaaatactgcatgttcccacttttaagtggaaactaaatgatgagaacacatggttacatagaggggaacaatacacactggggccttttggagggtggaaggtgggaggatgaagaggttctggaaaaataactaatgggtactaggcttaatacctgggtgatgaaataatctatacaacaaacccccatgacacaagtttacctatgtaagagacctccacatagacccctgaacttaaaagctaaattaaaaaacaaaaacaaaaaaccaaaatacttactttaaaaacaatttctgtggttgtccttctcttttttattgtatattggtttgtgtaggtccatttaatttgtttacttttcgtagtaggaatacaattgtcagtgacatctagtagattgaacataggctctgaagctgaagcctcaggtccatctttggccctgacactagccctgttacctttgtcattttacttaacagctctctgccctaaaccataacacctaccccatagagttgttgagacagttaaataagttaatgaaaagtcaggctcttagaatagtgctgggcatatatgaatgttcattggatattatctaatattgtggtcattatcagttgatttcttcttaatttaaaaaattttcgtatgtgatttcatgtggttttagggaatgataaatgtaatttagactttttattccattgggtctgttacagcttttttctcaatgaaactgatttggttacctcagttctaatgctggctttgcctctgctttttgatcacatttagaatacagcactcagttctgggtatgtccaagatagataggggagaaaggtaaaagagaatattaatgcaacttgattgtgcagctgttctttccacaaatatttattgaatgactgctgtttgtcacatgttgatgcatagggacacggtgcacacctgagattccattcctgtagacaggacatttgcctgcttcctggcacttatacctctccccaaattgacaccaagcattattttagaaaggcatttagtagaatgcaatatcagcaaatgaaaattgtagagttgtatcttgaagaaacttgaccccaccccccactctcacctgcatccccacatagagccaggacatctcttaagacccaccttcctgggtttgctcatagttggcacttaaaacattctattgcagttacctatttttgatggactctgcaagagagagactgtcagttcacaagggcactgatgtttggttcttcattttatttacagtatgctatacaaagggataggtttttgttgttttgaatatatcttgagtactcctttggaaggatagagtccaaaggcatcttacctgagccagaattcataggggtggttccctaccgtttcttctttcctgtacacactcaccaccctcaaatttccgctcagtagaggatgctttaggaccttttttcttctttctttctttcttccttttctttttttcctttttctttttgaggtagggcctcactctgttgcccatgtagtggcacaatcatagctcactgcagccttgatctcccaggctcaagtgattctcccaccttagcctcccaagtagctaggattactggctaattttttcagttttatttttggcagagacaaggtcttgccattctgcctaggctagtcttgaactcctgagctcaagtgattctcccaccttgatctcccaaagtgttgggattataggcatgagccaccatgcccagcctagaaacttttcttttcttttcttttctttttttttgagatagagttttgagcccaggctggagtgcaatggcgtgatctcagctcaccgcaacctccgcctcctggattcaagcgattctcctgcctcagcctcccgagtagctgggattacaggcatgcgccaccacacctggctaattttgtatttttagtagagacggggtttctgtatgttggtcaggctggtctcgaactcctgacctcaggtgatccgcccgccttggcctcccaaagtgctgggattacaggcgtgagccaccatgcctggtcagaaccttttcttgactccacttaagctcttccatttgaactttcttttaattatctggattttaactttatcagaattagtctgccggtaatcctgtttttagctagaaggttaggctttgagaagtgtgaagctggatgggagggaaggaggccagcaaagggaaagggactagctgggttgaagaggccccatctgctattccagatggggcatcctgaattcatcactcctaaaactttgctctatgtgttttctaggctgcagcatccagacagcagcacacccttcacatgttcactgtagtaaaataacgtggaaagggtagaggtatctggcagataagagaggttatttcgtaaggctgtgatgcccagcacataggtctgtacatcacctccttcctgctgctcctcaatctgcctttctttggtcactgccccctgctagtatttaattctgttgaatttgttcaaattgacttgtttaagaaggttacccaaatctgcatacagccttcagcattgctttgaatctcctttaggaaaggaaatgtagattcaaatacacaggtttatctctctgacctttagctaattattagattgagataaatgtgtgtaagtgacaaattgcctttaatgacatttaatctgcatcctgacattaatgtctggtttagtgtcccagttccatagaggcaaagagcatggacttttgtcttaatttgacctatttaaaaggtgtttgtggtgagagtcaacctgtgattaacttaatagcatgttttacatgaaaagcaatcaaatattgatgtaagaagaggctactagatgacatattttccagtctgtcataattggcaaaaacatcagagaaaggagagagttgttagtaactaaaactgaatgaaagcctcatagctgccccaaatccaatactggtgagcacattgatagtatctgaagaaaggaggctcttcttgttgtttattgtcacagaggccattcactgaactttggtgggtgttagactaatagatttttttttttttttgagacagagtcttgctctgttgcccaagctggagtgctgtggtgcgatcttgcctcactgcaacctgtccctcttgggttcaagccattctcctgccttagcccccaagtagctgggattaacaggtgcacaccaccatgccaggctaatttttgtatttttagtagagaaagggttttaccatgttggccaggctggtctcaaactcctggtttcaagcagtctgcccccattggccttccagagtgcagggattacagacatgagccactgcacctggcctaaactaatagattttcacacctttttgattcactaaaggacatcataggggcttattaaataagtgagctatttttagggagtgagaggtctgggaagtggcattcttggtggatttgttgtgtgctagtcaggtgctaggtgctttgctttttgcattctcatttaactcctaactacaaaaacatttgtacaggcaaccctctaactcgtgataccatctttttgaattaaattaatttttttttttaaataaggtcttgctttctcgcccaggccggagtgcagtggcatgatcacagctcactgtaacctcaaacttctggggtcaggcagtcttcttgctttagtctctagaatagctggaactacaggcacacgccaccatacctggctaaattttttgtagagacggggtcttgctgtgttgcctaggcttgtctcaaactcctggcctcaagtgatctttctgcctcagcctcccaaagtgttggaattacatgtgtgagccactgtgcccagcctctaattggtgacttctcaattaactttgacataagtgtgtgttttataagatcattatcaccgataataaatgcagcttaatttctaatcaattggccaaacagggaaatttgagttgagtgagatcattaacaactttctttagcgctttaagagctaagtgatagcttttccagttctttaaacattacaaactgccgttcctggtgaatgtcattttctcaaattcattttcagagactggaatgggtctgtgctactctatataattttgtgctgagcggatggtatattgatgggaggaagtaggagagtagtgatggaagggcacaggcattggagtctgtctcccaggtgactctgtaagtttttcaactttcctatgccttgatttcctcatctgtaaagtgaggataatgagttaatgaatgtaaagcacttagaagggtgcctgtagtaaggacttacaactgttttatttattgtttttggagtttggttggaggattcaaagcaacattcattaaactaaacactcactaaattcactaaaatggtttccaagtgaaataataaatatagcaaaggagtctctcctctgctatggagtagctgagttgagtgcatctgggtgtccattctgctgcaaatccaggccaagcaaatacagtttctgtgcaattaaatggttgttgactggcaaagaaaaaaaatgtaaaccatagtttttccttctaccctgtaatctgtggtgtctttatgcattaccttaagagcaacttcagtgacttgattagagggaggtttataaactgcttggaggcaaagcaccgaactcttgactggcacacagcaggtccacaaggaaagccacttcccagggtaagaaagcacacacaaattattcagggacaaatgtaatggttacaagggtgtcatagaaacagatcagaatacttttatactactgcctggcttcttgttcccccattccccattataattctggattcttaagtttattttaatgacaaacatttttgcctgtctttaagtaaaagaacagaaaagaagttacttaaaatgcagtcctaattatgtcctaatgcaattttgatgcagcaatatgctttcaaacaagcaggtactgggtggcagattgacacaagtatttagtgaattgagaacaacatgtgttacatgaaattataatcaaattacaaacaatggaatggattgttgcttttaaaatcctctgaatgttggttaacttcatagggcagtgctgtgactatttccattaattacggagtagttatactgggacttgaccaagctcttttaatagttccatctgatttatgtttttctcttctctatttttcttttctgtctctttatttctttttgtcactatttttgttgacctgtatgtgtgtttttttctctttctgtatcagttcaagttctccagagaaataaaaccaataggaggagtgtgtgtgtataaatctaaagagatttattttaaggaattggcttacttgattgtggggggctggcgagtctgaaatctgtagggcaagcagtaggttggaaatttggcaagagttattgcagtcttgaggcaaaatctcttctttgtgataccttatttttgctctgaaggccttcagttgaatggataagacccacccacattatagaggataacctcctttacttgaagttaactgattgtagaagttaaccacatctagaaaatacctttatggaaacatctaaattcatgtttgattaattaactggctgcctgctattgccttgccaagttgatgcataaaattaatcataacattgtctcattcctttttccctcactgtgtgtttctgtctctcatctcacatgcacacaaatgaggttatgggacagcattagtgttaatgaatttcaggtaacaggataatgatcattatagcatctaccagtaattggatacctattatgtgctgagtcttgtatttgatgctttgtatttctgatctcatgtaatcctcttgacaattccatggattggacagaattaattttattttatgggtgaggaaactgaggcttaaagagctgctagcttttatttagccatgtagagctcaaggttcaaactctaatctgcctttcctgcagatatactctcttctgtatctgcttgtttctctaatattcccccatcactgtcatcactggctatttttcagtgtttcacttggatgaaaaacatatctacatactttttttgtttccttttttttttttttttttaaagacaaggtctcgctctgtcaccaaggctggaacgcagtggctggatcttggctcactgcaacctctgcctcccaggttcaagtgattctcctgcctcagcctctcaagtagctgggattacaggcatgcactaccatgcctggctaagtttgttttgtatttttagtagggacagagtttcactttgttggacaggctggtcttgaactcctgatctctggtgatcagcccgccttggcctcccaaagtgctgggattacaggcgtgagctgccatgcctggcctgcatacttttttttactaagcttttttttttttttttttaataggatgctgaaggagctgaggcagtgctgaaggatgttaaaagcacacacagtggagagcttattgttgttccaaggcctaattggagatctaggttggcatttcctacagctttcaaagtgtacaactaaaagactatcctaagaagatgagatagtttctgaactaggcacgaaaagctgtaaggagtgtcacctcccagtgccctctggcctatttttctcactgatggattgctttgttatctgctgccagaccccttaatgtgctggctcagccttcacagggattagtcacagaagatgggcgctgcagctgcaggtctggctccagaggctttgggtggtacctactactacttacttagcccttagccagatattccctagaagggaaaacgctccttagtttcactgaggatctggcctcatgagcagacactagttctaataatactctttaccttctttgtagctcccagccattgtcttctaccttcccttgcctagctttagtcactgccagcagctatttctaggctgttggcactttgaagtggaattgggcagacagaggtgagagcaggctgtgagttccctctctggaggttggctccttacagcacacatgggaggcagtgctgaaggatgttaaaaagcacacacagaggaagagcttacttgttgttccaaggcctaattggagatctaggttggcatttcctatagcttggcatggaacgatttgaatgtttgtggatggtgcttgcctcataccttgccaactcaaattttgggcagatcagcttctgtgagttttgtctcgacaagttgggaaagtttcctaactttagatgactgtgtgaatctttgaggagcttgatagttagcaggtgagggctgctattttgaaggaaatagacattaatatattcttctttaatatatctgaatgggtatacatatgtgctcctttgtttcttgtaaatgggcagtacaggagggagaaactgaaggagaggacttggtcaggagataaacccccacagatgccaagatgttggcttgttgaagcttattcgtggttagttttactgtgatactatgtgcagatggttcctaagttataatggtttgacttatgattttttagttttatgatagttttggtgcaaaatcatttttttttttacgtttagtacagtatccaataaagtgtgacatattcagtactttattataaaataggctttatgttagattattttgcccatctgtaggctaatgtaagtgttctgagcccatttaaggtatgctcggctaaggtcaggtgtatcagatgcttttttgacttttgatattttcaactaacaatgggcttattgggatataaccccatgataagtctaggagcatctgtatttgtctgtgaattacttagggactcttttgatgtcttcgttttggaaactctctgttgttggtttttgttattttagccttgtcgggttttcctcatactggtctaactgctagtatcttttattggcccctctttcttggatatcctttacatgtttatatttgttagtgtttcttccttgacttgtctcacttctcgtgtttccttgggtttgcctccattactaagtcttcatccagcccctatgtcattggttctcaaagtgtggtccccagaccagcagcagcagcatcacctgggaacttgctggaaatgcctgaactaaacttaagacactatataaaacaggaaaaggcattttacattttgatacacattgtcaaaaacattgtactggtttcatggtatgcattataaggcataaagtagatcaagcctatgttcctaatgcatacatttctattgacctcagagagtgaactatcatataatagaaataggattatcattagtttaatgaatgagaaagactcttcatgtttgttctttacctaatctatgcagtttaaacctagatcgacctcagggaaatatgggaaattgtgttctcttctggcttgtttaagtacaaggaactcagacccactctaatttgctttaagtgtttttttttgtttgttttgaacagtaagaaactatttagggtggagaactttatttcagtaaggcctcatgtgaagtggaattaagacagtcataatgtccttttgtggcttgatcttgatgaggtgataggcttctgcacacattcatcaactgttcatattctttcccgctctgtccgccccccccaccctcatcttgcttgcacacacgtgcatacttttgcatgctctctgactctctctcttcttccctctccttcctgccaacacagctgtattcatcttcatttctttttcacctggcttcctccctctctgctctgtgtcttttcaggtccctcccaagtttagttcacgcattactcattctatgaacctcttaaacttcgtgcattctatcttttatccctattactatgtcaccctggcagtttcataatgcagatttctgagtaggagtcccagtgggacagaacctggccacttgatggcaggtccagtgtcctggtcgattcccttagaaagtgctgtgcagaggactgttactttttcttatagatcattctatgttttaagtattaaatgaagcctcagctccagcatagcgtttctgacaggctgactcacttcacatttaatgattgtatccagcatcttgtctctactctccagcaatgcagctccttcttctggtgtcgtcacttctatggacatatcctgtggatgttcccatccacctgagcccaaaacctctgtgcttgtttgttcctcctcctccttagccctcacatctcttcaatatttttctctctctttactattacttaatgctactgccatattgcttcttgactagattttaataatcttctgatttcaatctgttactttgtctcagtcagaataacctacttcccctttcacatgaaatacttatctaccctgaggaatatccctcaaggctctctattgcctgcgaattgagaatagactcctctgctgaagattcacggtcttcagcagtatgccccctacttggttcttttactccaaacactgtactctagctacataggactactgagtaatactcctcaaaggctccctctcttgggtacttgtaaagtgccctttagctgtgtagcagagaataggacaggagtgcacactctggggctagactgacgggctggaatctcagcccagcttgaaaactttgagcatttgttattttatctttctgtgcctcatttttctcaactgtaaaatggaaacagtgatagtatctgccttgtgggttgttttaagagttaaatatggagcactcagagcagtgccagacacacagcaaatcctcaggtctttccagggatacttttttttttttttttttttaatattctccattagacgtgatgtttctgtctctgcgatgtggtaattttttctgttttttatttttaagggtacctatcacagtctgcttcccccttttcagattatttgtggatttcagatgttcacctgtttttctttgagctccttgagtatggagatggtattttattgaaacttatattatgacatacggagctcaataaacatttgttgaattggattatatccaaaagatgcttctgctaaaatactgtagtaacttccatctgtcccatgaatgttcgtgttctgagacaataatgtaattcttaaaactaggttttaaaccttaaaagtgaaagaaagtgaatactttgcggttgtcatatagatgtactgctactcaagtatagtaagtatattggtgaaatatttagaaaaaaacaactagttgtgaatctgaatcagagatcagcaaactttttgctacagagggaaaaatattaaatatgttcaactttgctggtcatattatctgtgttggatctgtttaccacagcaatcgtaatatgaaaaatatgtaaatggttgagttccagtaaaactttatttacaaaaacaggtggactataatttaccaacctctggcctgtgtcattactgtgcaaaccacacatcattttagaagctgtttgttgcaaaagctccaggtgctgccacatccaaagatacacacctgcatgtcttctcattaggtataaggaaacctttccagaaaatctcagcagattactcacaagttcagtggcccaaagttgtatcacattctcacacttcaaaccagttactgatgatggaatgagactaccatgattggcccaaatacaccaggaatcacaggtgttgttgtggataaggcctccctatctgcatcacgtgaccatgttgatgagggcatttccttgtgaagtgaaaaccattgaattgtacaatgaatgtgatacagcatgggctgccacagtccagttgtcacctactcttctgttgttcttctgaacatcatcataatgtcacatttgacaggtgtgaggtttctttgttaaagctcagacttattttaaattaatattcttatcacatgaatagacccgtggtaatgatgtaatgaccttggaggggcaggccagttttccgctgtgaagcataaagtttcccatatgacatccttgggctactcattttggtattctcagatatgcaaaacagagaaaacaacaggcttcccacttcagaattcaccatatacccttctccttcttgaaagggagaaaccaattagacaaggactagccttctcttatacttaataaaggcaggtgagttgagcctcttagtatttgtcatacactatggattaaaccagtttatggcccatgtcattgtacccaaaactctggtgtataatagtaaaacgttcatagttttcaaattagacttagagcttcttggtctcactttagaatattttgacagccctttggctttcacagaaagacctagtccctcaggggtcttgaactgagctaattatcctagtcatatcctgtagaacgggatcccactatggcttgtctgagactgcattgttgtcttgggttgtatgggaccatgagacaaacggctgtactgtttttccacttggcttttctgtggtgtaaaactatcttttaggagccacaaaatgctattcttttacttgttgaaagattttaagaaagaaagaaagggagggagggaggactgtaagggaaaagagaccattaacatgacatgtttcctgtcgctctccaatctgagtctaaccccagatgactgtattcccattgttttattgtgagggcatttgtgagggccttccccttggttgtgtcttggtttacagtctatagaattggattagacaatgttaattcaattaatgactgtactgaaagtttgtcttagtgtgcagtgaaaacaggagagcagcctctaataatctatggatttaatgactgcaactttgaagagtgttaagctaaagtgaagttcagaatggcttgttaactgggtttattagctgttgaccttccctttcagcataatagtggcagtcagaccgaagagagcactaacgtcctgattagcatttatctaaagataggctgctgcctgttacacagtaaattagttcaatcagccataaagagcttgagaaacattttctgctttataaaaagaattagatgttagaacagttcatctggcatagctcagtgaagatggattgagcccctgaacgtgctcatttgaggaaggcgctttgaggatattgagtaattgaacagattttcctacaagattgatcaggggccctagatttcctgcacaattgagtgatgctctaatttttgccttctaataagagcagtacatctgctcctgtttctgtgtattcatcgagtgaaactgaaaatcaatttatttagcacctactatgcactctatgtcccttacgaaataaaagcaataggatctactgatcacagtctatttgattgaagagatgaaaactacactaaaacttgaaattcaccacttccactaccactgcttcttttcttctgaaaagaagaaactgtagaatgaaagctgctacttttggtatatttcttgagatcatcttatgaagtgaagcacattttcccacagaaacagtatagtagtcggggttaacgtttctgactaaagtcttggcaccaactaagttcttctcatagtgggtcataaaagcaaaaaggcaaaaattataaacctttctaaatcatttaaaaacttaaattatgatccaggtccttaaaaaaaggacataaatgtactgtacaattgaattttatgaggtgccccaatgtactataaagtatacatagagcatataaaattctaactccgctgtatcataaatttgacctcactgaaatgaataggctcactgtatggcaagcattaatgaaacgtttaattaacattcccttcacttgcatttttagaattttaaagggcttcctggggactatttcaatggctgaggtttttgcaaaacaaaagaacaaaaccttctcataaaaactgatctcttttgctcaataactcctccaatagagacatttaatttaattagactgatgaacctgaatttgaattttatacccaaacctatgatcatccttaaaaaaaataaaacaaaaaatatggtattgagacagttaagcacttgatgacttcatgaaggcttcctgtggaccctttaagccactgtgtatacacatatcatttatgtccttgcagttttcccaagctaaaagccacagggatatgagtactttgtgagggacagtggtgcagtgttagaatggatgagctgtagggctgtgggcttcagaccctttcatagctccctgtaaggtatcctcctcctctaaccttccctgtaattatgctatgttggtttactttattgcctggtcactccaggagaagtccccagggagtcatacttgaatgaacagatagaggcagagtaaaaaaaaaaaaagacattatgctaagtgaaagaaaagtcattcacaaatgactgcatatggtgtgactatatttgtattaaatatccagaataggcaaatctgtagagatggaaagttggaaagtagattagtagttgtctaggggtgaaacatgagagggatagggagtaactgctgataggtacagagtttctttctggggtggtaaaaatataaaattagattgtggtaatagttgcacaactatctgaatataataaaaaccattgagttgtgtattttaaatggttgagttgtatgtatgcaaattacatcttaataaagctattatttttttaaaaaggtattaagtttcctcaagttaaatgaaatgaccaaaaggggaaaggttttaagcagtgagcactccttgtaatgtatgtgtatagtgagtatgcatatgtttgtaaaagtataatgtgtgtgatccaactatgagccatatggtgctagtcatgatgtgtatacatgaattctagaaaaagaggaagaacctttaagtgagagaatgccatgcattgggaagcagtgtggggcaagatctgtgtggctctagggtggcaaatttagtttgagcttgtgaatccttgcagagattggcaaatatcagatactccttggcagagaaagcagtagagtcaaaattgagaagatttaaggaagcagagactaataaggagagaatgttgaaacctgttatttgtagttagaagtgtagatgtatacaaaatagaaaaaaacaaaaagaatcttctgcattatatcaggaggaacttattggtgttttaggaccattaagatggagaacacagctcactcatatgtgggagctacaaagttgagctcatagaagtagaatataactgtggttattcaaagttgggagacgtggaggggcggggaggatagggagaattggtaagggatacaaaattgcagctagataggaggaataagttctgttggtctgtagcatattagggtgaacaccgttaatcttttattgtatattttttaaaagctagaagagaggattttgaatattcccagcataaggaaatgataaatgttagaggtgatgggtatgctaattatcctgatttgatcattatacattatgtacatgtatcagaatatcatgccatagcccataaatatggttgctacatgtcaactaaaaagaaaatttttaaaagatggaagacaaaagtaaaagataaatgtagatattcttttaactgtttggtgcttacctggtgtcctctgaaaaatcagagtcgtgggagatgaataacatttccagagagcactagatgaggagttagaaaagctggtttatcattcctactctgtctcttcccatgttacattaaataagtaactctgtgatgctttcttcctcccttgagttgtccttcttaccctgagaggatggcacaaggatcaaatgagctgacatatacctattgcattgcacctactagaatgtaacaaatgtttgtcagactgagggaggaaggaaggaaggaaggaaggagtagagtgatatcacatgcaaggaattggatttactgacttattcctctggccaagtgtgtcaacattatgattgcaataagaacttttgcattaatactatttatacttatgggtattattgctgcatttggtaattctacggtaaatttggaggtgcttctagtatcactgtcttgttctaccaatagtcttgtatttattgacagtttggtggttgttacaaatgacaggattgcaaatagaaatcaagctccaaagatggatggattagcttccttgttatgaccgtgttaaggttaccactcagaacaaacattggtagttgagcacgtcttgagtgtgagtgtcatactcagaacaattctaattttttaaaaattacttttttagaggctgtctcactctatcatcaggctggagtgcagtggcataattacagctcagtacagcctggaatttttgggcccaagcgatcctctcaccttagctttccatgtagctgggactatagtcacgtgccattacgcctggctcaattctacttttgatgaagtttttgacatattgacattgggtttgacatgtcattccaatataatatgatactgtagcattcaacaattctcttcccagaggagactatagaaaacagaacatttgcatttcccattttgtactttatgccacccactaaagaattccaaagtcatgcagaatgcctttgatgatgtgagctgcatgtgaatttcttattgcttgacttttaaatcccctttgttatctaggtccattacttataagctgtgtcacattaggcaagtgacatgcctctctaagtttccacttcctaatctggaaaggggggaaataatgagattggccctgtggcatcaggattaggcaaagtacttggcataacaccagtctcacagaatgcagtttttcttgagctgttgggtcagtgatgcctgaaagaggaggagtggaggttctgaggcattgctgtttttatcacgtttgatttgttttctttttgtctagacttgccatattatagcttcatcaggattttaaagacgattgtgaattatattttcaaaagttgtatggactcttgtactttagtataagcagcacaaaattaggcttaagaaacttagattttaatgttagctatgagaccttaggtcactggtgcgtgttcctctcatgaaataagagaatggaaccagctggttctttattcttcccggttccaagatgatgtggtcatagagtcttcattgcataatttcttgttcctcctcatttcttcttaccacactcttgtctttaatctctgacacctttctacccatctccttcaatgctccttctattcatcctttcatacgtcctaaaaattgttatgtcaactatgaggcaagcagtatattaggagctagatatgtaatgttgaaaaatatagacatggttcctgcagtaacagaatttacagtttaatggaagaagtacagataacacaagtaatacttacaaaatgtggtaagtgctatgaaagagcaggacagactgctttgaatgggggaaggggggatccctggcagtttaaatgacttttctcaaagcaggctgccaaaaggtagcggcgccggccagaggtggtttgagaggcaaagcagcaccacagacaggggtccaaggcaagaaaacgctgagctgctctcaggtgctggaaagccagtgtggcttgaagcgtgctaagagtgagactggaaatgcatgccaagtttgaggccgagttcaggattttgtattccatgataagtgtaatgggaaatctatgagaacttttaagtaacaacaatatgggaatcatacttgacttggctagaacaattaaaagctgatctcttttagaaagtacagttttgttttacattaatcttaacacagaatagtgtattacacctaaagtgaatactcttttaggctgggtaggggctgtcccgtggtttaatattgtttctatcataggagaagccttggtttcctagtttcccaccttgtttctcctctctctgccccactgggattctagctgcttcttcactgcatttgctcacctcttcttctccacagtcctttggtccttgaaatgctgtaagagcagaaataacagctatccagagaccttcagatagcagatgtgccttgggcctgtgggtctgtggctctggagggctaggaattacagaagagttaaaagagaaggcctctgccagcaggaattccgaagacaccaaaactgatgtcactggctgtgcaggcactgagctaattcttttgccaatcagttaaatcacctaccaagagtgttcattgtaagtaacactttcttgccatttggtggggatgtagagggacaaaggatgcaaaaggcaacaggttctttccttgtaaaactgtaatctaattctgtaaacaagccatgtacctttggaaggtcattttgaactcagtcctggtaaatatttgacaggtgttttaaaaaaataattatatttatacaatctataatggaatattatgcagcttttcacaaggaggaactcctgccatctgccacaacgtgggtgagcctggaggacattatgctaagtaaaataagtcagacatgaaaaaaaaattgcatgatttcacatatgtagaatctaaaaaataggataaaaatacagagagagaataaaacagtggttactaggattgggtttggaggaaggaaatgtggagatttgagtcaatggatacaaagtagcagatatataggatgaagaagtctgaatatctgtacaacatgaggactatagtgaatcacaatgtactgtattcaggatttttgctgagtgagtaggttatagctgctcttgccacaggcaggaaaagtaagtaactgtgagatcatggatatgttcacttgttttcctatagtaaccttttactatatatatgtacctgataacaacatcatgttgtacaccttaaatatccacaataaaatgtattaataattttatttaaaaatattttaaaatgtggacaattaaaaattttttatataattttttggtagttataatgctctgttcttttacaaattgtgagctggatactcactactcttcttttagcccaaattgagaacatctggaggcatttttatgtgatgactaaaaatacggtaattgagttagactgtatgggtctgtaccctgctctgccacttcctggacatgtctcagttttctcatctgtgtaatgatgatagtagcgtccacttcttgttgttattataggattaaataatatattacatgtaaaatgttgagtataaaacctggcagatattaagcacctaataaatgttaggtattaaaaatatataaagtatgacttctgctttcgagaacttaacctataaatatcctttgataccccgccccccgccctttccaccttgatttcatttacacaagagccaagtgaaagagtagtgagagatgaaactaggaaagcaggaatgaggcagtgggtagagaaggatatgtcctgaccaatggcattgacagagtggttttgacaggtgagtgtggaaatggactgcggtgagggagagtggaggtagtgttgagaacccgtaggctctggcagcaatgtggagcttacttgcagcatagcctcccttcaacttggaaaccaagcatttcaaagtacctgggaactttcttcatcacatccttccagcatttacattgtttacaaatgaaggagggaatagagtatattttattttctgataactttctgggtttccaaagagagaactgtaaaactttgataaacacatccataagagttgctgcccacacggtttcaaaactggatctcttgagctgggcataactggtcataggcagagaaacgttgactggtgatttataccttataccctctcattaaacactcttacctaactacgcaaattaggcttttaaaaatagattatttttattgtttaaatgtagaagaatatatctcagagttataggaaatttgcatgggtacatgtttataataaaaatcctgccaccatttatcataaatggccttggtttaggagtttacacagtagagagctcaaaccactggctttgctatgaaatagacccaattcaagctccatctcttaaaaagccatgtgagtttgggaaagtggcatcactttcctgagccctgggtttctaattattattattattatttttgaaacggagtctcaccctgtcgcgctggagtgcgatctcagctcacggtaacctctgcctcccgggttcaaacaattctcctgtctcagcctcccaggtaactgggactacaggtgcccaccatcatgcccggctagtttttgtatttttagtagagacggagtttcactgtgttggtcaggctggtctcgagcttgtggcctcaggtgatccacctgccttggcctcccaaaatgctgggattacaggtgtgagtcaccacacctggccaggtttcttatttttcaagaggagttataagacccacaaaccttacaattattgtaaaaattggtaataatatatatgaaaagtccccagcacagtgactcctgcctggtaagcaacccacgaattttacctattgtcagcattgtttagatcacctttatttaacttagttataatggggcttaattacaaaggggatccatattctaaaagcaaatactgaaacaaatttttacaattcactaccggttcttcagattaaggtcttctgatcatggttcagtttgggtttttgttgttgttgttgttgttttttctccccaagatgcagtcttgctctgttgcccaggctcaagtgcagtggcgcgatcttggctcactgcaacctctgccccctgggttccagcagttctcctgcctcagcctccctagtagctgggattacaggcgcctgactaatttttgtatttttagtagagatggggttttgccatgttggccaggctggtctccaactcctgacctcaggtgatccctgccttggccttccaaattgctgggattacaggtgtgaatcattgcacccggcctgagctactgcgcttgggccatggttcttaatagtaaaattatttaacgagatttttcccagttcttactggtaaaaatgtcctgtggtttaaaaacgttcaaattaatttgttgtatatttcacatgacagtgatacgagggataattgattatttgaggtattgatttgacctaattcagcataataatttactgattttcattcagtgcatgctaagtactaaatccagtcttgctgggtacagagaaacatacattcattcaaacatcatctcttctctcaaggagctcacagtagaacctatttaaatttaggcagtggggagcatgaggctgcagagaaacaaacatccaactttatgaaaagacaaaattatggagacagaaaaaatgatcagtggttgctaggagttggggagagggaggaatggataggcagagtggagaggatttttagggcagtgactctgtattacagtgggtacatataattttacgtacgaccaaacccatagaatgtacagcaccaagagtaaaccctaatgtaaactatgaaagttgtgataatgatgtgtcagtctagactcatccattgtaactatgtaccagtcctgtggggaatgctgatagggagattgtccatgtgtagggacaggaagtacatgggaactctgtactttctgcccagtttttctatgaacctaaaactgctctgaaaaaagtattaattttaaaaagtggtcttactgctttggagcacaagtaaatcatactaagaagacgatgtttaaattaatatactacagatacagtttgctttactgaaatgcagtatatgatgttcaaaacatatatctttaagtaatagccattttacaaaggaattgcatgtttttacagggaggtttcactggcctattagggcatgttggcttggtggtacagctaagatctaattccttctgccaccaaggagctttgtgaccgtgggaccacccaggaacctctctggctgtattctctgcagaaagacttaggacaacaacatggcatgctgtgtggacatgatttgctttgttgggcaaactggtgggattggtggggtggatactctctaatggaggttaaaggtcctgaagccactgcaggttaccctggggcgccatttctgtgctctggattaattctttgctcagctgttaaatgtctgtgtctggaagtggagatacacaagatgggttggtccccatggctttttatacctcaacaattatttcatccagtagatatctatactaacttgattgtaaacattaagtttacatgggatttctttaacacatccattttctaagaaagtgatccatgtgtaagtatagagtgaccaatgagaaaatagggtaattcccacacacccttccaaactttacaaggagtgaaataatataaattagcttcctctagtgataaaactgcaagaattttcaggcaaaagaaaaacagtttagtagcaccatctacaggctactgaagaggaaaacttcctatgtggcttttaaatgcaaggagtttgtggaaaagggaatacaaaaacttcatactctcttaaaaaaatattatccataaaatatactaattttagtatttttgttcttctttaccatgcattcaattcattttacaatatgtctctagttatcctgaactagtggaatatagacttgattatgtgttttcattaggatccctgtttcatccccatgcttacaaatttctctccctctctgtactaatgataagaatgaactgtgaaattcacatgaattccagtagtttcattgatagtaattcacagtataagacttgaagcacaaagcctgccagcaagggatgtttcatcttagcttatctgtatactcaaaggatttattgcatcatttacttccattatgggaggaaaaataaaagcagacactcttgggtatgtatgtatatgtgtttgccttttttaaaacaatgaagttgatttattaccttctgggtttaaaatcttatctgagccttttctgcccctaagattctgtgattctataatcagaaatagcttggggaatggataattattttgtaaaggaatctagaaaacttgtctttgaatatgataacagtgaaggtaatattttcattcccagataccccagttttattatctttttttgctagttttattttgttttcttataaactattatcaattttggtaacctggaaaattttattggattctccaaataactggattataaagtatttatggaattatcagagttgtaattttctgttagaaatggcttattaaaattaacttaatggcctccttgtaagttgttggtggagttgctgtttcattcattcattcatttcattgtgtgtgttattggaaagtgggtaagagttactggaatgcctagataataagttttcagtaaagcattacacattgcaagaagccaatctgcacccccacccaccccccaaaaaaaaattgagcataaattataattattagaacaatcttacttgaacagcattatttcttggaggaaaagaggaatagaggagatacatattgaaatagtttgctaaactaaagaggaattcaaaggataaaaaaattgataatgagattttcaaggttcctgttgaaacagatgaggcagagcctatcaaaactggagccaggagtgataatggtttttaagtttgtgtagcttaattgctgatggtttaggttgatggaaaacttagtaatactgtttccaattttttcctcattattttaaatgtgtaaaaaaattgtgcattaaatactggaacctttctctgaaaaaaagtaaagcaagttctagtatgaatagaggtttaaagtaaggcactgcctcgtcgtcctatagctaatatttttccctgtttttcttgcaccagatggcactgtttagttctatttcacaatcttattctggaactttcttcgggagaatctgttttagcccagggtcaccagtgacacctctctattctgcatgaagtctttatgaatgcttgtaaaaggtcactgactcagacatgaagctgtttatttgaggtcttgtggttctttccagttgcacatttgctgtgaggtgagcctaataaaccagctgatagaaacctacatgcttcttatagagttcagccagtattttgcttggagacatattgcaacaatatgatttcagcattctcacggcccagtctaattatctgacacattttggaattattttatatgtaaaagtagagctataagcagaagggcacactcactaaaaaaaaaaaaaaaaccttgcagagcttaaaatgtttcatgacagtctgttgaactatagatttatcaaattaacttgcaaaaataaaatttaaagaacctttcctgactattcccaaggctgacttggaaggaaattatcaatgacctctgatgtcattatgcataaatggggcaggtccatagccaagctcgcctctttgctgcacataacaataaaacatccttttggaagatagaattagctttatttaataaaaatgccagggtcatattgtaagacttatctctgtgagctttgccctcccctcccctcctctcccttgaataatacagaaacgttggacataattatgacacagatttcataaggctgcttctccttttacaattatattttatgaagaacagacaatgttttctttgcaaattttgaagctccttcattttctgaatgcattggatttggtactaaatgctctctcccgtttgcatttccttctctccctccctccttgcctccttccctcccttccttccttccttccttccttccttccttccttccttccttccttccttccttccttttttttttttttttatttttggtcagtgtttcactcttgttgcccaggctggagtgcaatggcgcaatcttggcttaccacaacctccacctcctgagttcaagcaattctcctgcctcagcctcccgagtagctgggattacagacatgcgccaccacgtgcgtctaattttgtattttcagtagagacagggtttctctatgttggtcaggctgctctcggactcccgatctcaggtgatccgcccatctcagcctcccaaagtgctgggattacaggcgtgagccactgggcccggcctcccctttgcatttcactgctctatgtattctcttggtggtgatatgagttgaagggtgggagtaggggtggagagccctctctagactggagctatgagtgcataagtgaaatctcattatttccatctttaaaagaaggagtattggcgtgtggtgtttttagccagccctccctcctttcctctcatgcccatccacaggccattgactggaaggcacaacagctcccagcacagcccctcctcctgccgctggagaggtgttgggactggtgtgctggtttccaggtgcaggtcctccaggctgagccacagctctctgtagaagtaagcatgagacaggctgcttccataaatcaagccctgaattttattacagtgtttatgtaacctcagtttatgtgctataattctttgctgtgttgcctagagtaattcccaaagaggatgtttgttctttttccctggaaattttctagcataggccttttgttttgacattctccttccccccaccctctgccttttttgggatggcctggggatgggtatcactaacagtcaattgctttttactgagtaaataatataatccagcgtgtgttagattctgtttgtactagatgttattcctactcttaagtgggagaaaaaatctcaaattaatttttacattttcaagattatagggtggtagggttaatgtgtacttaattgatgagtaaatgaaatataagtgaaaacaaatgcctttgctatccatgggagacccgttccttttcatagcctccgccaccatcacagatctcatgttgatagagtcagattgaccgctgagagagaaaatacagactggaaattttgggtgatttagacttttaactgaagaaaatgtcagggtaagatgaccagattcaactgtattccatgtagacaactatgtcaagagagaaatgttttctggttggaaatgaagacaatttgacttaaccggagcatgtttttaaagaaacccatagcatgttttttttttttttaacttagctctttttttcgaaccttatgtttggccctacagagaaattaggtgatgagactggacctactgaaagtgttaccggacctattctgcttggacacgctagacttgtgaactgctgactggtatatttcagttagtacagttaatgttttatcatcactgccattagaaggtattacatagatgtgatctttttcattgtagtttaaagaagatagttaatcctggggcaaagtttatgaaggaagtgtgtgaacagagcaatctttttagatttactttaactacaaaactggatatttgttttaaagctgtgctgtttaggattgtagacactagccacatgcaactgttgcgcatttgaaatatgaccagttctaattgaggtgtgctgtaagtctagaatacacacttgattttggagcttgagtatgaaagcaagaatttataggtcctctttaatcatttaaattaattacacattgtaataattatattttagatacattgggttacataaactgtatcatcaaaattaattttatacctatttttaccttgcttttactttttaaaatgtgactcctagaaaaaccttaaaattgcaaatgtgactcacatttgcaactcacattattttattatattatattttattttattttatttattttcaagatggagtcttgctctgtcacccaggctagagtgcagtggtgcaatctcggctcactgcaacctctgcctcccaggttcaaacagttctcctgccccagcctcccgagtagctgggattacaggcgcatgccaccatgctcagctaattttctaccttttttttttttttttttttttaagtagagatagggtttcaccatgtttgccaggctggtatcaaactcctgacctcatgatccgcctgcctcggcctcccaaagagctggattacaggcatgagccactgcgcctggccttgcaactcacattattattggccagtgctgttttaaagttctgttgtccaatgaagggaataacagatgagtacactcagtaaaaccttcaaagttatacgtttaaaggaatattctatgcttcctgataaaatattaataaccaaaattagcaacaatatatagatgaaattattgcctcaagatttatgaggaaatattgactggaatactgtctattaaaatattcctctttacttgtcaagtctacctctcagtatcttaaaggaaagttctcatctaatagggtgtagaggttaagagcatgaactctaggttggaatcccagcttggttgtttactgtctgtataataggaagtaagttatttagcttccctgtgcatcagcttccctacatgtaaaatggatacaccttaatatcttcttcatattaaataaaacaaagtgtataaagcacatgctaggattcgcacatactacataagtactatgtaagtgctagctattatagtgatagatgttattgttcttatcttgttaaaatacgtacaactttttgatagattattcgaacctggactctattctcaagcaaatggaagctgttggctttcagtaattagtctgaattttgttgaaactcagaaacaactggcagtaattaaaaatgggaaagtaaatgagcaaagaagggagctcatttattggaacatatgatgagaacattccataaagtaaaacttgtagtaattgtcgattaaaccaattttctacctgatataaattcagtagtactatatttctttttatcatgtttctttgtcaccaggtatattggtctgcaattttgagtctttggaagttatttttgtgtttattatgctctgataaagagatgatgacctcttaatcttgtgtccaagagtggtggtgctatattgtcctagaattgtttgaattttagagcaatgtgtatgtgtgcatttaaacccaagtttaataagtcattccattgtgttcttaatagggctagataacctgagaaccagttggttttttattgtgccgaataaaatttgtaatctggtttagactctgtacagcactgtaggtataacaagtcttttatgcagttcgggggtgatctgtgatataagtttgttatggtggaattgatgtttgtgatgggatgtctagatgaaattaccccatggaatataatcttttttgagtagaggatggtatttaagaaatatgtcttcaaaactcttatacaggccagtactgcctctttagatgtaaaagtttataattttaattgcaggaccttcttttacttggcttttaaaagttattcacttagtcaaaatttattgaacacctatagtattccaggcagaatgctaaccctcacggagctcacaggggatacacactaagggatatatattgtagtacagcacagtgctgtattaaatagcaattgcagagacactttccctattttttatgtttttactgccactttgcctttataacatgaggtgattttagcatagagctgaaccaaatgttgggatattaaaaagctgaagcaaagttcataaagagcatgacttgggcttggactttgcattttacaaggtgtgcagtgtgagcttacagaggctttgacagcagggagtgagtggagcgttgggctttgttatttggagagatcactcttagtattggtattgggacatagatggtataataacaaggagagactgtaagaaactttgcagtatctaatcaagatatggggagaaacttacactaaagagtgtgtgctaggtgaagaagaggtaggattttaaggaaattctccaagttttaagtgcagaagtgtgggaggaaaaaatgtaagatgatgatggttctggcttgattttccagagtagagtagagtagccttcaagatttgatacaacgcttgacataggacatcttaaaggggagctcttagacttcaaggagaatatggtaaatattaagtacactattgggagcatgggtctgctgtatgggagagtgtcttggctagaggcttacttgaggtagtcatgatctaaaggtgatagctgaaggcatgggaggtagatggtataaaataataagcctctccactgtgcttctgggggatttccaaacaccttagcatgccttacaaggccctttagggtttttttctgtactttgttagtctcctttacaaaagttaatgctgttctctctcatgcaacatgcattcctcgtgtctccagctgtttgctgttctcctcacttcccgggctcttctgtatctccattacatcacacatgctgtttcctgtgtttgcaaggcatggctcctctttgtccccttaacaagctctggatttttctttaacacccagttcctgaacctccatggcccagctaatagctccatccttgaacccataagattttgtacatatttctattagtacttatatctcacttagagtaattatcacttgcctttcactcattctgtatagactgtgaactcctaaaggaaagagaagtaactttagtcatttttacatccccaacctcaaaatggcacttggcaaatagatgctcagagaatgtgttttgattgaattaattcatttgtgtgtgagctgcaggtgtcacattagtggcttttggatgtgtccagaagtatacctattatacgttgaaattttgcaaatcatcatatttgcaaaggttaaatgtaaacaggagaaaggtgagacctgaggtccttgtcaaaactgtttttcttactgtaatatcaatgtgtattgtttgtggaaaagttgattgataaataaaagaagaaaatttaaaatatccatagtctgaccacccagtgatatcttggcttaaattgtacgtacccaaaatagcaaaaataggatctatctgtgtatattgtccttgacttttttaaaaaacttactatctgtgcatcattaaatattagtaagtagtcatgttttgtggggttttcttttagtttgagatgaggctggtcttgaactcctgggttcaagcagtgttcctgtctcagcctccaggtagctgggactataggtacacaccaccaccatcctcagtagtcatttttgagtgggctagttaaatagacgacactcccatcatgcattatttaaccagttccttgctgttggacttataggctgacttataggctgtttcaaatttttaatttatatagtcacatttcaatgaacaatccagtagtgttgtcatattcatttttatttagaatacttcggtgaaaggaagtatatatcttactttttccaactctattagcaaatcatctcttggacatttttttttttggagacagaatctcactcttgcccaggctggagtgcagtggcatgatctcggctcactgcaacctccacttcccaggttcaagtgattctcctgcctcagcttcctaagtagctgagattacaggtacctgccaccacgcctggctaatttttgtgtttttagtagggacagagtttcactatgttggtcaggctggtctcaaactcctgacctgaagtgatcctcttgccttggcctcccaaagtgctgggattacaggcgcccagccagtctcttggaaaagtcttaacaatttttattatcaccaactgaattcttctcatcatatttttaggttttaaattgtctggaacttaaaaatatatgaagataggccagccacagtggttcatatctgtaatcccagcactttgagaggctgaggcaggaggatcacttgaagccaggaggttgagactagcctgggcagcatagcaagaccctgtgtctacaaaacccaacaaacgtgtgtgtttgtgtgtgtgtatgtgtgtaaaacatatatatgaagatatgatatatgaagatacattacgaagataattcaaatatatatatgaagatacataggaagataatttagcttgctgcaacagaaattccaaatttagggctaaagaaattatcaaactgaagcctttttgtaaatttaagtagttttgttgattttagaagtagacttttctggccaggcgcggtggctcatgcctctaatctcagcactttggaaggctgaggcaggcagatcacctaaggtcaggagttcaagaccatcctggccaacatggtgaaaccatgtctctactaaaaatacaaaaattagccaggagtggtggtgcgcacctgtagtcccagctactcaggaggctgaggcaggagaatcgcttgaatccatgaggtggaggttgcagtgagccgagatcgagccactgcaatccagcctggcgacagagcaagactctgtctcaaaaaaaaaaaaaaaaaaaaaaaattagacttttccaaataatggtcaaggtttttaagtatgagaaaggagtttcatggtcttggggatcagggtcctcttggcatggagtgggtggtgacgtgaaggtgagccctccagttccagctctgttattagccttcttgtgcctcttgtgtggctgtttcccagctccaacccaaagttttattaggataaagtcttggatttaggcatatggatattaaatatcagtagctgaatttggggtttgaaataattgctgcttacttctaacttccccatcccactccagattctttttgccatccctatctacattaaatagctaattgaagccaggcgcggtggctcatgcctgtaattccagcactttaggaggccaagacgaatggatcacctgaggccaggagtttgagaccagcctggccaatatggcgaaaccccacctctactaaaaatacaaaaattggctgggtgtggtggtgtgctcctgtagtcccagctacttgggaggctgagacaggagaatcacttgaacctgggaggcagaggtcgcagtgagctgagatcatgctactgcactccagcctgggcgacagagcgagactctgtctccatcaatcaatcaatcaattattattcataaaatgagaagaagctcctccgccttcccctgccaaggggatgagcaaatgtgtgttacagctcactttgaagagctgtccaggcttttgagtgaaatgcagaatttttacctcttgcttagtaatttgctcatttttcagactactttgcacagatttaatgattaaggaaacaggataggcaaaggtgccagcgtttgatattatcttaaggcctaaactgaccttacggtgatgaaatgaactttttgagtgcgtttgtctcctgaataaatctgtaacagttttcttaactgactccctctgtctctcagcatcagaaagaaatgagagaacattaagccacagaaagcaaataatggtcaaaataaagatactcttttgctggcaaacttaaaaattcacttgtggggctgagcgtgttggctcacacctgtaatccctgcagtttgggaggccgaggcaggtggatcacctgagttcaggagttccagaccaacctggccaacatgatgaaaccccttctctactaaaaataccaaaaaattacccaggcgtggtggtgggcacctgtaatcccagctactcaggaggctgaggcaggagaatcacttgaacccggaaggtgaaggttgcagtgagctgagatcacaccactgcacttcatcctgggcaacaagaacaaaactccatctaaaaaaaacagattcacttgtggaatctaatagctgtaggcaagggatatttattgaaaccaagatttaagtgtggtttatgatgtttatggagtagtttaatactacttttcttcaaaatgagtttttaatttaggaaaaagaattcagatatgttcccagagtagagatgactgaccatcatgggagtggttagggtttggggtttgtgtgggtaagattctgtttacccactacagccattgtgtggatttaaaagctttcctggatggaatttatggagtgaaatttgaaactagtgtcctgtgtactacaatatatggtcacaacaagcaatcaatttagaaagaaatggaacggagaagatacaggttaaatgatgagtattgtgcagtgcagcaagacatagagtgatcttaacagtaatgtggtatgtcaccatctgagttctgttataaagctcctaggcaatgactaaatcctagaaatcattgcctactttcagtggcagacagagtataatccattcatgatagggggttccaggtacattgatatagaagactggccaagggggaatgacaggggttacagctaacatttcctaggtaattggttctaatttccaggctccaagcaagatactgtatctcttttaccctgtttaatcctccccagcacccagtgaggtacagatggtattgtatccattttagaattgagatgactgaagcttagagagattttcccagtcatatatattcacggttcctggatacagctgtacaggttgttcactgcatgaaggtggctggctgaggtagcaggcaaaggatttgtttgctcagcagaggcagcattttctaatttgcactaaaacctgtgtaggccaactgtagccctactcataaagttggttaatgcctgaactgggagtagaggtgaggcagtgttgaagtggataggtagattctgagaagcttatactatacctactgaagtcctaatctgtaggctgtctgcaaactggtttgttttgctaccatcctatcccagcatttcctcaaagatcccacagtgacttctttattgtggatctgatggtctttggcagctatacagacattcttagagtcacagccaggattaaagtctaggatgcttgtcttcaagtcatgcatgctttctgtatgagataatatacaaaaagatggtcaagaaaagtgattttgagataaatagtggcctagaatagctagactgagattgttcaagcacagctattaatttgcttacttgctcagcactcaggctgtgctatttgcttcaagggatataaagattgctgctttctagaaaattataactcaattagggaaaccaaatcaatatatatttcataatataaaataagagaaattacagataacaataaataatagccaaaatacctttcttaactaggcatgtctatgtttctttaccttgctttagtgctcttagatgtcccattccagcctttgagttggagtggggaaggtgttccttattaaagaagcatctactacaaaaaatctaaaaccagatctgaggcccatactagacccttctattagtggtaattttaaaaaagaattttccatctaaatttaatagctttcttctgtagctaccctaccctatccctgggccaggcaccaaagtgaataataatgtgctataaaatccaaaccaaaatagtacatcttctttggcatttgaaatttcagtgttttttgcgtgtagctacaaatgtcttccattgtggcaaccactgttttgggtggttttttttttttggagacaggatctcactctgtttcccaggctggagtgaagtgatgagatcatggctcactgaagccttgccctccagggctaaagtaatccttccacctcatcctcttgaacaacttggactacaggcatgcaccaccacagtcagctagtttattatttttatttttgtaaagacagggtctctactatgttgcccaggctggtctcgaactgggctcaagaggtcctcctgtcttggcctcccaaagtgctgtgggattactggtgtgagtgaaccaccacagtcagttttggggttcttttgaataatcagaagctgaaatcagaagccaaaaatagcaaaatgggaattctgtgtgcttttgtgatatgattatatttgtgttcccagcctccaaagaaagcaaatgtaatttatatggtactcaataaactatggcagtcaagaaaaccaaaagaaaaacctttttccacttggcactgtccaatagagctttctgtgctgatgaaaatgtcttctatgtgcactattcaattcggtagctactagccacatatgcatttgatatgtggctagtgtgatcctaaggaactgaattttgagttttactttcataaatttaaatttgcatagccatgtgtagccagtggctaccatactgggtagcacaggcatgccacatgctgtttctctcttaagttggcacctttaatttctgttttaaaattcatgtctcctttacttgtccccttctatcttctctttctcactcactcccttcctttttctctttgctttttatttctccttgcttctttgctttcctgttttttctcaaccttctgtgatactactaggctgaccgtaaccccattaattataattatttattatggtctttcacctagttagacttgcctgcctgtgttctccttctgtccccaaagatgggggcattcgcggatatgcagtgtttaccaaaagctcctgatatactggttacttaataaaaacaaacaaaaaaataaatgggatttttctgacaagatggttttggtgaacctatgctgattcctgagatcacggcttctttttctaaatacacaaaaaaactgctttggtaaatcattctagaattttgcacagaatgaatcaaaatcagtggtattacataatcctaggctccatagttctgatttccagaactattgactaatagtaatcaaaacactggaatacttcactggaagacttctctgtccttacttttcagtagggggtttaatctaactcctctccagtctttcttctagaggaactctgtaattccaatctcactattttggtcttcccttctcctcctccttatctcttccccctttctgcttttccttctcctccttctcctgatataacttacttcctttctgagaatgccacttgtctctttctaactttaggtacttttgcctacttctttccttctactttaattcacatagaagtaccgtgagactatgtaaacacatctactttaagttaaacatttcctctattcagagtcatgcctttttatatttaaaaaaaaattctaggctgggcacggtggctcacttctgtaatgccagcactttgggaggccgaggcgggtggatcacctgaggttgggagtgcaacaccagcctgacaaacatggagaaacctcatctctactaaaaatacaaaattagctggacgtggtggcacatgcctgtaatcccagctacgtgggaggctgaggcaggagaagcgcttgaacccaggaggcggaggttgtggtgagccaagattgtgtcattgcattccagcctggacaacaagagcaaaactccatctcaaaaaaaaaaattctatatttgatttcaagcctcaaataacttaagtaataatgactacccatctgtaagagtccttgctttgtgatactgttacactctgttgtattgagaatgctctaagtcatatgttaccaacatgctgtggacctttagcttttcccagtttccagacagaagcagtggtcagtcacttaactgcactagacagaaaagcagtttttcccttctgaaggttaaacaggtttttacaccactggagatttttaaggtgggtatgggtattaaggtgggtattgttagtcttttccctctaagtttccccaatgtccaaagaattaacaaaattttaagggttctgatttatatggtaacacagtctgttagtcagatgtaccaagtttcttcctatctaattttttttatttttattttttttgaaatggagtcttgctcttggtcaggcaggtctcgaactcctgacctcgtgatccacccacctcagcctgccaaactgctgagattataggcgtgagccaccatgcccggccttttttattgttatttttttcagagacagtgtcttgctctgtcgcccaggctggagtgcagtggcgtcatcttggctcactgcaacctccacctcccgggttctagcgattctcctgcctcagcctcccgagtagctgggattacaggcgtgcaccaccgtgcccggctaatttttgtatttttagtagagacggggtttcatgttagccaggctggtctcgaactccggacctcaggcaatccatcctcctcatcttcccaaagtgctcaggatacaggcgcccagctcttgccatcttagagtctttgcaatttttacttttatagcctaaagtggcgctttgcatgcctagatgtatcttcagcctttatactttaatcattctgaggggggttttctgtgtccctccttcatcaccttcaccctgtttactccctccatatcattcattcctcaatacttatttccatgtttccctgtctccaccactgggatgtaaggatttcttatcacttgttctgtgcagttaatctcagtgctcgggctcacagctgggagctgataagtgctcaatgaattcaagtgtttagaagaatgttagtgcagagtagagattgggcaggcagtgttagtaggttagtaattattactagaaccaggtagagtttctacaacctgcattgaggccctgagcatgaagaatggagtgttaaaatgagcctttcaaaggcaggattggcaactgtgtgaggtgacaccactagagacatggtttggacagcgcttccgaagatggaataccagataaagatcagtgtggatggtggagtccttaactgattcagtttaagatatttgattttgatgcatttgggaatagggtgctcttgctgagaataggggttagggctcaatttacaaacctttctgttcctacattctaggttcctatgattataatgattcttgctgataatattttctcccagcattatttcttatatataatacgtgactataaaggctcgttcctgtttcaaatgcctttgcacatgcatgatttggatttttttccagccaggtctcaggggccatgtttttaaagtctgctgctctttgggctgatattgtggcttcttgaatcgcatacaaagcaggtttcttgaaatctgctcatctaccatagtttaccagttatctgtatccttgcggctctgcttgaactgaagcttaatcttgttctttgtagggcccagctatttttgcttgtcattctatcacatgccgtttaccaggaaacattcaaataatgattaatgatgccaaaactttaaacatggaggaagctggtaataccagctccgctgtggagattttcaggagcatcaatgccggctgaccggactggtatttgagtctcggataatggagtagtaggtctcaaaaagttacacttttctgggtaattgtcagcttcccagagtactgttaaattctgtccctcaaaaatgatgaaattgcaaaggaatggtcactgttacaggtattctatcttcattatctgatttaatcctcaaaaaaataattgatgtggaataagttttttcattcccattttaatgctagaaaattgaagcacaaaatctacccaccaaattgtggactgtgttttctgtatctcttatcaaagctctccagggtccctagaccctctgttgtccctctgttctagcctttcagattggcttctttcacttagttattatacataaaatgccatgttataaaatgcctcagtcaggataatggggaaagtgttcttgggagacagtgcacataaagaccttacagtgctgggtgctcaaaatgttaccatcacttttattgttagcctcttccctcttaagtttccccagtgtttaggaaattagcaaaactttaagggttctcatggtaagacagtgatacgactattatgtatatggtaagggggtgatatatctatcatggtaagtaacaggacattgaaaagacagtcatgggaataaagctaagtaaacacatgtttcattggaatagcttctattagtgacaatacctcctatattttggactaattcccagatgaaagattttgctgaaactaggcattaatgaaactaagccattcagtacagtgtgattttctttttttatcttgtgatttgagaagtatattctaaaaacccagtaattcagccaggctggacattcagttaaatatcagtggagccagctgtgtaaggacttattggctttgtcctatacatgtggtatgtctggagttttggaaacaattcatggcctccttttatcggttgagtagcattgaggcctcataaaaaatagtaacttgattctaaggtaaatttccctggaaagtatgaaatgggaaagttaggtttccatgtacccccccgctacgcatagcattatttcaattccaagaggcatttgtagtcaatttctatgatgattggaaaggagcttaaaaaattcttacaatctctttaaaaacttttgaagcagaggagaaaaaattggtaatttgtttttcaggaagaaacatacctggatttatctattgctacatgtaggttttttttttttttaactaactagaatcacagcatctttttctttttaaactaacttgaatcacaaaatcttatgtcatacttcatgtctttccttattaaggataattagtttatggaggattcagttatgatggtgatattattagagacttatctgaatgaaatcagaaaagtgtatcccgttttatgtagaagatttttacataaaatatttacacacacacatacacttcattttttagagcagttttaggtttaacagcaaaactgagcaaaaagtgcagaatcctccctacccccaccatacccctcaccctagcatccctgactataagcttcaagactgcaccagtatggtacagttgctacagttgattaactggtattggcaaaacataatcacccatcttacatagtttacattagagttaacttttggatttgtacattctgtgagctttcacaaatataaaacggcatgtactcaccattatggtatcacacaaaatagtttcattgccctaaaaatcctttgtgctctacctattcatccccctaccaaaaccctgatctttttactttttccatagtttcgccttcgcaagaatgtcatacagttggaatcatactatatatatgtagcctttcagattggcttctttcacttagttattatacatttaaggtcctccgtgtcttttaatggcttaatagctcatttcttcttagcactgagtagtacattgcctggatgttccacagtttatttttccattcacctaatcttggttgcttccaagttttgtcaattatgggaaaaagctactgtaaacatttatgcgcagatttctgtgtggagatcttaacattcacattggttactttttttaaatttcagatttatcaatattacagagctattgcaagagtcatatgagaatcgaggatctggaaattctgtatgaaagaggtgccatctgagtagggccttaaaggatgcgctgatttggacacatagattggaggaggtacatcgtactgtggctggcacagtatgtgattttctgtttgattggagttcatggtaaatgtaggaacacggtgttatgttttcgatgccttcgatgctaggctaaagaagataggcttccttagtgaggccataggaacccatggcagatttttgaggtaggaagtgataagtaatgtcactcatttatttaagcagctagtcaagctcgcttagttccaaatagctgcttgaccttgcctagttccaaataattgacttaaaattaacaagttgacatttattaaacagtactttttacagtttaattgttcaccactttagactaaattttttctacaggtggtgcaagttaattagattttcttataatgagaaagaaaagcatttcagtacagtgtcttctgttctgatattcaaggtcatttcctatataaaagtaaaattctacacagcataaaaccatcctttttgacatttagggaccataggttttaataacattgaacaaagggttaaattttttaaaaagtttttgtacactctttctttggtatgcttcatctctttcatttgagctgaacagctttaaatttcacttaaagaaatgctagataaagagaagaacattgtataagggcaactaagtgaacaggaagctgtgcttctcagaatggggagattttaaaatagaggagaaagctgtcaaagcaaaagtatagcagcctcagctttacttgggaatttattagaaatgcagattgttagactctaccccagaagtcctgtgggcggggctggcaatctgtgttgtaagcgagaaagactaatctaaaccactgatcaagggagggggatgttaagacttactgcagaaaagaggtgagaaattgtactaacagttactgttaattcaacacttactttgtaatgcacattttacagatacagcttatgtaatcttttatgtcaaccctaggaagtataatattacaatatcttactatatagatgagcagaaaagaatggtttaagaagtagcattgcaaaacttccggcatggaaggtgtctttgactctatactctgacctctttaaatcgtgctaggccatgcaggtatgttgtttgtctcccagaaggcagcggtggggctaaggcagcacccacctctctgctccctctgctgcattccccagcctccctgactgaggtaggtatttcttccttcctgcatccaggtggagcctgcctggtccagtgaaggaagcagaacaggaatggcaggaaaccagctttttctgtttctctggagttctcttaacaaaccctgtgaccctaggcctgtctcttggtatctctatgccttatttattttcagcggtaaaatgaggactgggataaatctgtaggttctttctgaattttatctggctctagcacttaattagagacagatggtcaaactaggtgacctctcaagggttcattctggttcgtgttgagaggagtttgatattggaaataatagattcttgtttatgtgcgaaatggagacagtactttctggaaatggtgtgatgcaaagtgaaatcatgtctgtgaagtccctagtagcctgcctggcatacatggaaggtgctcagtaaatggtagttcctcagtccccaagaggaaaacagccgcattcctgattctggtgttttctttccttaagttttaacaggttagtattttaattttcctctcaaggagggaataagaggtgctaggtttgtattaaaatattaagttaattaaagcttcctattaaaattttaagagagaggaagagaatggggcaacatgaccacaataaataaagcaaataggtcattatgtttccaaatggcattatcccttgactgttggtagctttcctaataataataggttgaaaaaatgttactgtaacataaataataaaagatacttatggtagtactctgctaagtactatatagacatgagatacttaataacttttaatatcatggtttggcaaaagaaacttcacaatggattaactatttatttggtgaacttaacttggggcaggcttgtgggtggaatttaagggttatttcttcttttttttttttttgctcccccggagacggagtttcactcttgttgcccaggctggactgcaatggcgtgatctcaggtcactggaacctctgcctcccgggttcaagcaattctcccacctcagcctcccgagtagctgagattacaggctcccgccaccatgcccagctaatttttcttattttagtagagatgggattttgccatgttagccaggctggtctcaaactcctgacctcaggtgatccacccacctcggcctcccaaagcgctgggattacaggcgtgagccactgtgcccagccgagttgtttcttccctaatttctctcacaaaccttccttttatatagagaaaacatttttacttttcatttgaaatattcttattgttgtttttttctgatcattactgatgtaccttctatagaaataagacacatatttggcagggcacagtggctcatgcctgtaatcccagcactttgggaggccaaggagggcggatcacgaggtcaagagatcaagaacatcctggccaaccaacgtgatgaaaccctgtctctactaaaaatacaaaaattatctggacatcgtggcacacgcctgtagtcccagctactcaggaggctgaggcaggagaatcgcttgaacccaggaggcagaggttgcagtgagccaagatcacgccactgcactccagcccaggtgacagagcgagactccgtctcaaaaaaaaaaaaaaaggaagaaataagacacatatttatcccaacgtacattgtttttcacaagttgcaatttgatatccttagctagtttcatcattctaccgtgacatttatccccattatgacatttctaaattatagtgcttctctctcatgttacgcatgtttctaagctcttggttggaatctgtaaaatagctagttgttaacatttaataaaatttagacttacctcaccttactctgttagcaaagagttacatgaactctgttgttttgaattaagaggtcagttgtggcagtaaacctgggtagaatttggaaaggaactaggctacttcctttttgattcttccttattaggtcatttgtcaagtggatacattatcttctttccctgagggcaggagaccatcttagttcccttctgttaaagagatctatgattcattacttccagtgtgaaggccaggtgcttttgcatgagttgtaaactgctaagcgagcccttttgtgccttgtttgtgtatgagagtctttctcttcagagtgtagggcaacctgtccccaaccagtcccctttcccaacatccccacccacagtgtgatggatgctggcagtcataccacattcaacatttccaagtgggacttgtttttattggatatgatcaccaaaaaaatttgaatttagatgagaaacaaatcaaggggtggttattcacattgccgatgggttttgggttttgtttttttttttttccttcaaaatggttcagcctaggggttctttaaatagcaagttgctctgctagatttaaatgggatttgatatataaaaatccatttacacatttaacaggatgttatgttggtataccagaatgatgaagagcaaaattctggagtcttaaacccaagcaagtttagaatcccagctttctcgtatcctggcttgtgtgatcatgggcgagttatttaacttctctcagcctcggttttctcactggtaaaccagagatcatagcacctcatagatagcacttctggagtgttttgaatggcagaaacagaaagtgtcgtgtaagacaacacatgcattgtgtaaggaaagtcttagatgtctaacacagcagtggcagtgttcattttcagggccattttgcctgagtttttgttaggcccttctctcttttcttctttgaatgtatttgtaaacttgaaaagaacaccgcgaaaagagctcaggatcctgctcagccacacttcacctgctctccagcttggcatgattgattgtcaggaaggcataaagaactcaaaccatgaattaccctactcggggtaatcacaatggtttggatggcatctccttaatttttgctttgacttttctttcctccgggcaagagagagtagaaggagtggcaagagtatgccttttagttactgagttctaaattcttggaatgagcatagtctgttttctcaggatcagactagaaggcgtcattctattacagaagagccaagacttgtcccaaatggatgtgggtttcagcaaagcatctttagcttaaggagcgaaggatttggactgtgttcagcatctgtgcttcgcaggccactctttatccttttagtgagtcccgcttgtctgtcctctgtcaagggctcgtgtacaccatgctgatttagtgctaactggggagattacaaatgccttgcctggcactgtcagctaaacctgaatcattgtctgtgtactgtgacccgactagtcagaggtttaccctttgctttgctgctcactcttataggcagaaaagcccagctcaccccagcttttataacggggtcagctccagaaatagcacctttaactgggaatagaagcaacacaaatccagcaagtagatagtatacaatggctgctttttggccttggaacaaacaaaagtggtttatgtttactacataccacttccaaaactgctgtctgtcatttactagagagtttatcattcctgagggccaaggtctaggttttcttcacacaaatgccctccaagtgggagctgcttggtgttggtcattgtttgcacccagatttataatttggggttaattagacataaagacttaaaggcaaatgtggtacctgatggaccatgggtagataagacacctcccaaaatggatggtgaaattctttttaagagtcatagtatggagaaagtccccttgtgaagctttgtgttggagcctagaattgtaatgtatggcactattagacttccaaaaccaatgtgaacttcagtcgtttgtatcatgatttgctttatcctatgttcctatctttcccggtagtaggtattactttgtctgtgggttacatgtctttctcctctaagatttaacctggggattattacatgcatatttatatgcccagagacaatagtaggcgctcatcaattgttgaataaatgaatgaatgaatgaccaaatgattgaacaaacaaaggagcaagtgaacaaacagagatgtgaagtggtggggggcatttctatatgattgtgtgtaaagagcaccctaacacagcatctgaacaaatcactcttggaaatctgttcaatcccaccaccttcactagctattcctgtgaaccccaaccctcccctagatacattttggtgatatattagattattttttctttgcctccctcctaccatgataaaaaggatattgaatggccaaaccagtgcattacagtaacatgaaagaaatgtttatctttcatctaccagaattcaaggaaaaaaaccacaaaactttgtcagctagatactttcctgaattgttttttaaaattgtttaaaaaattattattattgccaggcacggtggctaacacctgtaatcccagcactttgggaggctgaggcaggtggatcacctgaggtcaggagttcaagaccagcccgagtaacatggtgaaaccccatccctactgaaaatacaaaaaatttagctgggtgtggtggcaccatgcctgtaataccagctactcaggaggctgaggcaggagaattgcttgaacccgagaggcggaggttatggtgagccgagatggtgccactgcactccagtctgagcaaccagagtgaaactccatctcaaaaaaatatatatatattattatttttaatagggtcccaccctgtcacccagtctagaatgcagtggcacaattatagcctacagcagcctgaaattcttggtctcagggaatcctcccacctcagcctcttgggtagctaggactgcaggtgtatgctaccatgcacagctatttaataacagttttttttagagagggagcgttgctttgttgttcagactggtctcaaattcccggcttcatgcgattcccctgcctcagcctccttctcaggtagctggtattgtatgaattgtgttttgaataagaagaaattaaggcttataagatcagttgtgtgttagcagcgatgttgctgactgatctttgcaatctgtaggactatttggtgctacaataataagaaattaatcagtttgataattttgccatcatttttaaaaaattttgtaaaataattgaaaatcatatgtgcaatatcttataaatttttattttcaaagcacattcctatatggcaattgaagtacagtttgaacttacttttgactaccttcttaatagtgattgatcataaattataaaattttcacttaccaaattatgtttaaaaagctaaatttaacattttctttttaattttggagttgaatggtcctttattccagtctttgtttttgtttttttccaagggaagacaaatatttaagttcaaagtcatgtttaatagaggaaatgaatgaaaagtggatgtctgttatctgtttgcaacaatcatctttatgtcctagtaaaagtttaattttaaaatctaactttacagatctatacccagtaaatttttttttttttttttttcaaacagagtcttgctctgtcacccaggctggagtgcaatggcgctgtgtcggctcactgcactccgtctcccgggttcaagcgattcttctgcttcagccctcctgaatagctggtactacaggtgcatgccaccacacccagctaatttttgtatttttagtagagacagggtttcactatgttggccaggctggtcttgaactcctgacctcaggtgatctgcctacctcagcctcccaaagtgctggggttacaggcatgagccgccactcctggcccccagtaaataattttaagaatcttaaagttactcatttttacttagactttatgagattaagctattttcaaactcacttctatttgtcctcccctgagagctatttacaaatttgtatagcactctggagtgtgataatatcgaagtcaatgcacagtcaggaggcttgttaacttatgtgatgatgtcagttttgataaacatctttctcatttaggcatttaatgataatcatttcttcaagaaaaagttcttagtggggaaaaagaggcgaaaagtacagtgtgattaacttatgatgcattttggattacagccttttaaccaaaagagaatcatcattaaaacaataattcctcagaaggcttgaggcatttaacttctcttaattaaattagctcagtttactgccagtcaataaagtctggtttggaatgatgatagaaattaaatatctaagaatgcagtatacataatagttaaagaaatgcaattaaaagtaataaggaggtactacttttcacttaggaaattaataatgatttatagaagtgagactactaacttctgggaaaaatatagtgagactgtcacttttatacaccactagaaagcccttttataatgtttgtcaagattcttcaaaatactaatagcttttgatccattaattctttgtctaggacatgctgagttggtgatcagatgtgaagaaaacttcaggccaggcttggtggctcacgcctgtaatcccagcactttggtagttcaaggtgggagcatcgcttgagcaaaggagttcaagaccagtctgggcaacatagagagatcccatctctacaaataatttaagaaatgaaattagctgggagtggtggcacatgcctgtggtcccagcttacttgcaggactaaggcaggaggatcacctgagcctgggagattgaggctaaagtgagcccgtgatcacaccactgctccccagcccaggtgacagagtgagcacctgtctaaaaaaaaaaaaaacctggaaaaagaaaaacttcatacagccaaaatacccaacatcatgcaaatgcatggttgatttatgttattttctattttggaatattatgcagaggttaaataataagtgcacataatatttactacaaggcagaatatttgctatatcttaattttactaaaaagtgtaacatataataatatttgaattatgtatggaaaaagagagtgagaacaagaatgaattgaaaacagaaagaaaatgcacccagatgtttacagtcagtgattatgttctgactggcaaaacataagtagattttttttttcttttttttttttttgagagagatggagtcttgcttgtggcccaggctggagtgcagtggcgccatctcagctgactgcaagctccccatcccaggttcacaccattctcctgcctcagcctcctgagtagctgagactacaggcacctgccaccccacccggctaatttttttttttttgtatttttagtggaaacggagtttaaccgtgttagccaggatggtcttgatctcctgacttcgtgatctgcccgccttggcctcccaaagtgctgagattacaggcgtgagccactgtgcccggccataagtagatttattttctaaaataagtgcatattacacttatgataaaaattatcatcatgaaagattttatgttcaaggatttcatatagctgctttgtatttcttctggcacattacagtcatagtggcagtgacttgtagggacattgtcctgatacttcgagtgcaattgatgatatttgtttaatagtgaatgtagcttaagaaaagaaaagcaatcaaacaacaaggtgattaatgtagccacttcaactcctcagatctttggctgacatgttttcctagcaaagcagaggtacttaactaaccacagagaaatgctcacacatgtcagaaggaaatccaagtgatcacttgttttgccttgggcatctgcactttttatataagtatgactttcagtctgtgagacctttcgataagtagtgataatccagaaggattgatgtagtgattctggacttgagatttcttttcaccactaagacatttgactgtcacttgcatcttaatgcgtccatataattttctaaagcattgggggactgactaggtaaagtcactgtggccttttaagtatgtggccagctgatctcatggcctaccagggcttccaagtgattagtggggattggcaagaattgacctctttggagcctggggaggcagaagtacctcagtaatagggttcagggagaccatacatggagcatagctctctctgactttcaagtggatagagctagtaggcctctactcattgtggtgtttgtgatcagacaacccttgctttggaatcactcttcgttgagagatactgagtccaggatgtgccaagcaagattgtagatactctcacagatgaattcacccattcatttattgagcacttgattttttaggagtacaacttcatcattaatttcctagctgtgtcatacaggatcagttaggttagattctccctttgtaattaatcctaattgctgggactttcatgtttctaataaatgtctattcccataatcctgtcctacattagctttcttcatgttgttctgtgagatctatagtaagcagatgacactgcttattatagattagctacttcctgtgtaataaatcaattattcctctcaatagggacaatcttgaattaaaatcacatttttttcttagagaattctctgtcaaattctatcaaaggccatggttttttttgtttttttttttttcctgtccagagacaccttattaatgacttgattttatccttatttcaaattctaattcatgaatatcagggtataaaatattaaatatgctggttcagctaccagcttttcaagcatcattggggaacatcctgttatataataggaaaacatttggtatggcttttgggatgtagatcatttttataattattatagggagtaaaaaatgcagaataaaaaataatttaaatataattagaagtgagagcaggtcagtatgaccaagaatataaatcataaatctctctatttttgtgttcctttatttcatgcagagaaataccaaacctttgtttctaaaagggcaccaggtctttcagaaagctgtggttctcagcagcaattttagttaggtttcgtttcatgttttctggtattctgggcctcccaatagccatttgtgcctaaaagagagagaggatgaggagatttgggttgcttgtactgccagcctggtggcactctggggatattagatgtgttctgaggatatatgtgtttatttaaatttaaacagaaagtatttcaatggatgctgggcgcagtggcctgtagtcccagcactttgggaggctgagttgggtagatgacctgaggtcaagagtttgagaccaacctggccaacatggcaaaaccccgtctcttaaaaaaaaaaaaaaaaaaaaattagccaggtgtggtggtgcatgcctgtaattccagctgctctggaggctgaggcaggagaatcgcttgaacccgggaggcggagtttgcagtgagcagagattgcgccactgcacttcagcctgggcgataagcaagactgtgtctcaaaagaggctaggcgcagtggcttacgcctataatcccagcactttgggaggctgaggagggtggatcatgaggtcaagagatcgagaccatccatggctaacacggtgaaaccccgtctctactaaaaatacaaaaaattagccgagcatggttgtggtggcacacacctgtagtcccagctactcgggaggctgaggcaggagaatcgcttgaacctgggaggtggaggttgcggtgagccgcgatcaagatcatgccactgcgctctagcccgggcgacacagggagactccatctgaaaaaaaaaaaaaaaagaaagggagagagggagggagggaggatttcaatgggacagaaattcaccaggtacattagaaagccttaacacttgagaatgtgaagtcttaaaaaaaatttttttaatagtttgggttacttaaaatgaaatactgtactgaagcagatagaaggactcttaggacctttctgtgtttcttctgtacctaatggcatataataaattcactgttttgtttaaatgatcagttgacttgagctttctgtcatctgctcagaaacactactttaggaatcttattccatttgggaattctgactagaagctctcccagggtcatcatatgaatgagtaacttacttcgcagctctcctcttcctcagtagctgcttctctgtagggctggagggaaagagagtcttccatgcagtctcatcagccaagaggaaggagatgctggtacctggtctgcatcccaacagacagcacaccctcatgccttccccttgaatgtacctttttggctcttcctcattcctggggaaatgtaatagttcttgattgttcacagtgttgactgctccctacaatgtgaggttccccctctcctctcccacagatggcacagagaaagtgcttatcatcgacacagtagtggggaaaaaaatggattctcattttagcaggtgacttgagggtggttggttgtcagtgtgctttttttcatattggcttgttgctacagggtctgatgctggcagattacaactttgtagctagtcattttcgatttatttgaacctatttctccagtctactgagctttcactggctagcatcaattcagacacattgcaattcttcagaatctctatccccatcagatggttcgatctatgagaaatttagctagaggcgtttagacaaaaaagaaatattgtggctggggaagcatttaagttagaggaggcagccagggctgttttattacttagtcctgtgtcacctgtgatgacccatgagagtggagaatattgatcgcttgtcactcaaggcattcagcagattgcattgacaaagcttggcaggtctctaatagcagggttactggccttgctgcggcccaagggaaaactctgcaggccctattacttggcggcctttaactcttatagaattgggagagaacactgacaaaagcgaggacatgattttacggttacaaatgatttttcttgcttgctttcttctcaccctttttaatttttcttttcttcttttcctgtctatcttaccttccctccgtgatccctgccagcccctcctttcttattatagctgatcatggcagtattgtttttttctgggtaaaaatcagagtggattagagaaagcttagcaggcctagcatgaggcctgagttattctctccttttaggacagcttgtgcctgaccacattgtttggaatgtgcctgtggatatatatacagtacttgaacttgatgtgtaggccattcacagctgttgtcctctagtagaataagaactgccacttcatgacagatgggtttctctcgttttccatttcctggtagccaggcttggttcaagcctttgaccttacatagtcccgaggttcagctgaaagtaatgtgctgacatcagagagataatggcactagtgcaaaacaggaatgattctaaaaaaacagtagagaggattctatctttcctagacactgcctgatttatgcacaggttcgaatcaccaccattaatgacattttcattcctaacataggttggcctcctgttggacactgttgtgtaatgagcgtttctgcatggctgtcatttgctttatgaagcattctttttatttctattttctgtgtacctttcatttaaaaaaatatcgtgtttgttatctccattgtctctttgaggatgagaaagacaaatatcattacccccatttcaaagaagagtaagttctaatcacaagtgatttaaatgttagagtttcattcaatattttcactaaaatttctagtcctctagtaaatcagatataagcaaagatcatatgtctatttcagcctctaggtaggctggccagctttcttgctttctccctctcccctcccctcccctcccttcccctcccctctcctcccctcccttcccctcccctctcctcccctcctttctcctctccttttttttttctgtagtcttgtactggtcaccccttcacttcctcttcctttgcaatgctttaggctgcccaaaaggttctagccagatgaacagaaacagaggagaggagagcttcttaagaggctggtaggccaggtgcaatggctcatgcctgtaatcccagcactttgggaagccgaggtgggcagatcacctgaggtcaggagttcgagaccagcctgaccaacatggtgaaaccccgtctctactaaaaatacaggaattagctgggcatgatggcgcacacctgtaatcccagctactcggggggctgtggcaggagaattacttgaacccaggaggtggaggctgcagtgagctgagatcacaccactgcactccagcctgggtgacaaagtgagacctcatctcaaaaaaaaaaaaaaaaaaatgggatgggtcagccttgagtagtggacatggcctttgcatttatattccaacattttgccacagatgagttatgtattattggcagattacttaatctctctgagcctttgtttctccatttatcgaatggaaggtaatattgtttaccaaaaaaagtgaattatgtggtatatggattatttctcaataaaaaatatgagttgtgtaaagtttctaacatagaaatgccctcctttgcttccttcctccttatacaactaagggcccacaaaggcagaatgagaattaccatctaggccaatactggggaaatatgtgctactactggagacagaaatgtggaagtattgcaaacgaatgtggacctattaatattctatagcactttgagccactttgaattaaaatacttatctgtgaaaggttttataatttatatgacctgaaataatttacacctaattagattttgtcaactgaataattctgtctcatgttgcttccacagaataatttaagcaactgcattttattctcaaaatagctgtaaatgtcaaattaattttgttgacatgatcaacatgtagaagagctacttggcagaattgtttgtcaactgaatgtattatgcatctttacaaaatatgtagattgattatggtttagctgacttttgcagtttgttggtctcctggaaagaagtaacgggtggtggttacaaaaaccgttatggcatttctgttcatctggctagaaacttttcgatatctgtaagttttccttcacttttcattatatagaccatgtctttcccttgggtgttatcttttttgtctgggtgagactggatcccacgtaactgctttggtgtttgttatactcctcattaattttatggggctcttagttgacactggccacataaaaatgattgttgagtctcactctttttattttggaccatttctttcatgtgggagcctctttatccctctccttaaaaaccctgtttaaggattagtgtccttgcagtttagttgtagcttactcaagttatcccatttattccaaaatcccttttccactccattataccctgtctagtccggtcttctagctactaagattgaagtcctgtcatcttcaggtttggttgaatccagtgcttcccaaccctgtctcatcatggcacatgtagaaaatgatattattgtacagcacacggaagtaaatcaagaccttttgctgtggaggtacctggctcagaggccatgacctgccttaagtaggagggaatacatgcatactatcctgtatgttttggtgtaaccaatccccaaatttgaaccaatcttggcaggtattagaaatttgcttatttggtgacatctggaatttacctcctcttttgagctcagtatttcatgtactttaaggtcattactgagctttctaccaaatcattcccatttgtgtctagtcattagataattcagatttctaccttggatgccttgaagtgatgacaccttacccttgctcatctctctcccaagggaataaacctgtattttgctttcagcttctgcttagaggagctggctccatccagaacaattcccctcccactggacatcaaaagattgcatttccattggcaacaagtctcaacatagctcagaaactactgttgactacttgtctcccctataacaatattggatccattggagagtgaatcagtgtctccctcaagttcagcccactcatttagatttttcattttagactccgtgggaaggatgtcccagtgcagagttggcctctgtacccctgattatgtttcagctttctctaatttctctgctaacctgctgttgatgcccctaaaggcactcaatattgagtgtgctttataaatacatgaactacatgtattttatgaaaacataaactacaaatacgttaaaatatactgtagattcattactaaaaggcattatctattcagtatccttaatgtacaaataataaaagagatatgaaaccctgtgtctagagctaaaaatataccttgacagtacaaatacacatggctaaaaggcattatctttttagtatcttcaatgtacaaataatcaaaaggtctgaatacttctgattttcataatggagaaggggaattgtagaaactgtagaccaattagcttgatgtcagctcagaaaagattctagaaaatattattaatgaatgctttctgagagtttaataaaagaagtagtcatcactgggaacctgtggaggttcacttaaaatgttatgccatctatattccttcttctgcagcagagattgccaaactttttctatacatagccagatagtaaatattttaggttttttgggccatacagtctctggtacagctactcaactctgccactgtagcaggaaagcagccacataggcagtatgtaaacagatggatgtggatgtgttctaataaaataacttaatttataaaaacaggcagcaggctgatttggccaattggccatcgtttaccaacccctgctttagaagaatatcttagataatgtgtacctgatatattctattcttctttctgatgggaaatactttctctttttttggcgtaaagacgttttattttctttgctaataaagagttggcataaaaaaaagcatcgcattaaaatcttcataaaggacatggaaaaggctcaagttaataatagtttacagtaagttctcacttaatgttgtcagtcatttcttggacactgctaccttaagcaaaatgatatataatgaaactaatctttttttctcaccaacattgtagtgaaaagatgttgaacaaaaagacgttatccaaggatgtaaatcatttaatttaaagttgcagtttccaagaacctattgactgtgctaagtgaggacttactgtagttaggtagaattataacaggtttaataattatgaaacatgaagagtggtctgtggttgcaggccacaggctgtgtgctcttgattcaattatgtcaatatttttattagtgacttgactgaggttggaattgacttgtggatcaaatgtgtggatagcctgatgaagagagagatcacttacactttgggtgataggagtaagatcccaaaaggccttaggatagcagctgaaatctttcaggcttaaatgttgaaaacagataaatgggaaaccctgtgtctggagctaagaatgtatcttgacagtacaaatacaaattgtgaaaacatagttgaatagcagcctgtttgaacaaagctaagagagtatttcaattagagtgcttgcagagaaagttatccaggtggttgaagggactcagaatcatgtcctattagaaatggttgaaagaagtgtagatatatagcctagggggatatatgataactgtcttcaattatttaaagggctgtcatgtagaagaggaattagacttattctggggggtcctggaggacacaggggagagcagtgggtagaagatacaggtagattcaatatgtaaataggaactttctaacaatttgagctgtccattagagggatgggcattatttagagggtttaagtcactggcaatattgtagacatctgttgctgaccttgtggggatgttgtgagagaatattagctttgactcattattggatgggatggttcttatggtcactaacaattctgagagtgcgtaaaaggtaggccgagggataatgtgctgcgccctacgtcccagtagttggcaaagtccaaacccagatgttttgagtctcctgccttgtttatatggttgaaatgctgactttacacagtgttccatatatgtatctgtacctgtcatctttatgtgattggctagagaccctgtcacgttcacttttgtaatctcacaaagcttgacaaatgccctgtacataggaggagcaaagtgtttgttgacctaaagtgaattacagaacagctgagacacatctaaatattgttcttttactgatcctggttccataatgaaaacatttggaagttgaccagaaattatacctggggattcctagtagaatggtgatgtagatggaacggctctctgcctttgtttctgtctgtggtacaccacacacaaatgccaacacttcaccaagagtggaagccatcaggctgcactctctgaccaggattgttttaccccttctggatggcaatacatcgctccctttctttttcactgcctcctgtgcatacctccgtgctaaattaaactccagaccctgggatgtctggaatatattttccagtcttctgaattctaccaccctgaagtagtcatttgctgtcatcataattctggaagatttaatattcagattgacagtggatatgccggtctcattctttgatgtttggtacatgggcaagtggtcaggtatcctggcctatttatcaccatattctccatggcctgtactcagggtcaggcatatggtaggtagtcagtgaatgtttgtttttgttagtaggactctggtttagtccttacagtagtcccttttatccatgttggtatgttccaagacacccagtggatacctgaaactgtggacagtaccaaaccctttccatactgtttttttttaatatgataaccaagacagctactaagtgactaacaggcaggtagcatatacaccatgctggacaaagagatgattctcatcctgggtggacagatcaggacaacgtgagaatttcatcttgcaactcaaaatactgcctaatttaaaatgtattgacgaattgtttatttctggagttttccatgtaatatttttggactgtggttgctcatgggtgactgaaaccacagataaggggtactactgtacttctgtttcatcctaatgaagtaaagtttctttgttcatcaaggcagtattttctttctcttttgtacctaccatgctctacctacctcatgtcttcattttctgtgccactttcttgctgtgttttattaggataatgttttaatagaataaaagaagggcaaaggtatagtaattgaatgtccttcactatcaatccccccaacccctgaagggagaaaggaaggagaatgtgggggagaggggaaggaagaaaggaaatggtggagaaagtagagaatgagagaagcatcctgtttcatactgagaagactttggtattgaagaattttgactttgttagtgccatataacttgtgtgttgctttgtttaaattctcgtctgctctcatgttttcattgcattctgtggatagcagctaagagagctttcagacacatctgtattagaagtaaaataactgttaatgtcaagactatatctttgcttttttctccctcagcttcttttctcgattggtagaaaacatggaataatggtgccagggttagctttgcctggagaagagttctgtttgccagccctgctgcagattgataaccatcaagggaaggatagcccagtcataagtgaccttgtggactgcgtatctttatgtaccccttacacactagtaggaagaacccaaataccatctgccaatgacagtgaggcaggaacctcacttttgtgacaaaaggattgtactttgctctgctggaactggctcgttaacaattcataagaaccaattaagttttcaagaattttgtgagctggttttttagtaaaacctttattagaagttaagttatattaaaaaaaataattagatgggtatggtggcaggctcctgtaatcccaactgcttgggaggctgagacaggagaattacttaaacccaggagatggaggttacagtgagctgagatggcaccactgcactccagtctgggcaacagacagaaactccatctcaaaaaataaaaaaaagttatgtaaacttacctgtgcttttaatataatttacttaattgtaatcagtattcaaaattcatcacttccttattagctgctacattttactaatatccatgaccttgaggttatttacatctagtatatggtagaaatactacaaaatgatgtgttattgagcctcttttcctaactctgtattcaatgacatcactttagtagccatggtggaagtatttacaccacagaaattggtaaacaggatgtcttattctgttttgttctgctgtaacagaacaccgcaaactgagtaatttataagcaatagaagtttatttggcagatggttctggagactgggaagttcaagatcaaggggccatatctggtgaggaccttcttgctgtatcacagtgtggcagaagacatcacatggtgagagaacatgctcaagagagtttgaagctcttttataatcagcattaatccattcatgagggtagagccctcatgacctaaacatttcccattatgttccatctcccaacactgttgcacttggggttaagtttgcaacacatgcttttggggggacacattcaaaccatagcactgtacaaatccaaatttggtcatttgttttgttgattgtctacacttaaaagaatgatggaggaaatgttattaatacagattaaatttaaaagtatgttgtatttgcatccattacattgtggatagcaaaacaattaagagaatatcttcttgtattttgaaactgtttccaactcaacaaagaagttattcatgtcctcgaggaaggaaactgtttatatcattcatgtcttaggtgttccactttaattttactggttcaaaaacatcaaccaggttttacaaaactacactcattcttcaggtacaaccataggttggctgtagatataagaattgcacatattttaacagaagcattctgtgaatgttaattttcccatttggttggaattcacagtaaagtttagcatgtactttgttattatttgtaaattgcttgctatacatgatttatatcagtaaattttataataaataggtgtacatctatacatacatacttcttttcccaaggagctggttgttaagtattaccaacacactactgtttacaatccaaatgagaatgtagctctgtgtcttaaggtagtgatgatcttgtgtaaatggtgagatttttgccttcatcatagcaaaaggctcaaatgcactataggaaggaaacctttctgattatggaatatgaagtcaggattttaaatgccaccaactgtcgaacacttaaaggacaaagtgtttgaaatcttaaagcctgcctactctatttaaaagaacattagagggcgttggaaagaggtgataaatatcattaggacctcagcaaggctttggaacccaacacattgaaagataattgagtgaagaggatctctggacacaaagcaggcaatttagttatccaaagcatttatgtcaagcagctaatgcgtgaggatttatttatttgtgtttttctctcagagcttaatccatgaggagtacagagtggtggtagggtggaggctagcctttattttgcattgctctgagaagtgttgcgataatgggagaaatttggtgtcctagaaacgttattattataaatgaaaaatcttgaaatacgaggaaagtgaattttttaaaactgggattagaaactcagaacaaaatgagctggacgcgctggtcatgcctgtaatcccagcactttgggagtccaggaagggcggattacttgaggtcaggagtttgagaccagcctagccaacatggcgaaaccccgtctctataaaaaaaaaaaaaaaaaaaaaaaatcagctggatatggtggtgggtgcctgtaatcccagctgctcaggaggctgagtcaggagaatcgcttgaacccgggagatggaggttgtagtgagccaagatcatgccagtatactccagtctgggcaacagagcaagactccatctcaaaaaagaaagaaggaaaaaaaagaaactgagaacaaaatggtcttttgcctctttctacttaaataagatggctcatgcaaaactatatttttgtgtgagatttttggttaacaagaagttgtatttccgttcatcagttagactcagtgtggaggaatgttttgtttaacctactttaactagaaacaaaatgtatttgcagaagtttataggtagaattataaggtgatctaataaacttgaaggttactttcagcatatggaaatcagaattttgttagtggaatggcaaatgtgaagaatgaaaaatccagttgatgccagttaacattaacttttaggaaagaaaaaacggtagatttttctgtgaagagtgtgtgtgtgtgtgtgtgtgtgtgtgtgtgcgcgcgcctgtgtgtgtgtttaaattagatttttctgtgaagagtgtgtgtgcctgtgtgtgtgtttaaaatttagctcatctggttctgtgttgtgtgttttctctgtgtgtgtttgaaaggggacatattatgaacgttatggttccctacctctaagatccattcctaaaatagttttactaatccgaagaatgactaagaatgtaactatggaaataaaatgacttttcaatcctgtgttgactacgtgcctaaaatgttgatttgctaaaacctggtacttccaaattaaatttcatggtatatggatgatttattgtaatctcttgtgaggaaattcatcttaaaaactttttcgaaatcatcctaagtttgggagaggagagcatttctaattcaaagcaggagtcaggctaagatcacatgtctccctagaggaaagaggggaggttttacttgtgcatatgttttttaaatatttatagatacagctggacttttagtactttagttctggttttaatgatggaattcccaaaggactaaaattgttccaaatgtctgaaccgtgtctgaagttcaagaacagtatatggttggtctgaagactttaatcctagttggaaactttgaatgagaaacctggccttttagtcttgtatttcttgaactttctgttaacagaatatctcctcgccttttatgtagcccttaactagctgcagactgacttggtcttctctagtaaagcattttctatgtaaggtcaccagtaaatttctttttgtcaacagagtaccttcttgcctcctattcagccgttaactgttttgtactgacttggtcttctctactaaagcattttgtatataaggtcaccagtaaatttctaagtcataaaattaagtgatttttcttatttcccatctatccagtcaacagtcattttattcagtacctactgtgtgacttggtgctagggattcattagtaaacaaagcaggaatattcttttacaatgtggagctttcaattttctgaccctgttgaccttccttcttcaaatttcataaactcgcttacttctggttagtgaaatcaatgatgattattttaataatgattcctcccctcatgattgtgctcagggccctctctttccctgatgattgtttttcttgatactttgtggatgattttatatggctaagacttccaggttgtcatctgcccatacacagaggaagtcctgagggaacccacgagtttcctctcactgcttccgtgctgtgtaggcaccttctcctgttagaaaaccatcaataggagcttccatgatcatggtggaggcggcaaatagtgtgtattttgcagggataaggcagcgaggacaagttgcctctatctactttagccagaagattagtactaatttctaaaactttcaaatttgtctttaaaaaattgcacccatatagcatatacatttagttgtatgcacacacacactaaaataaacttctttgtatacagtgatttggtataatcttaggacgattgtattttccttttgtttgtaacaactttattgagatataattggcatataatgaactgatcatatttaaactatacaacttgataagttttgacatgcatacacctatagaaccaacacaatcaaggtaatgaacaggctaggtgtgatggcttacacctgtaatcccagcattttggaaggctgaggaagcagaatcacttgagcccagaagttcaagatgagcctgggcaacactggaaaactctctcactacaaaaaaattaaaaattagctgggtatgttggttcgtatctgtagtcccagctactcaggaggctgaggtgggaggattgcttgagcccaagaggtcaagactgcagtaagccttgatcatgacactgtattttagcttgggtgatagagcgagattccatctcaaagaaaaaaaaatgaatatatccatcacccccaaaagtttcctcctttctctttgtaattcctttctcccccacctcccttccatctccaccccagcttattccctggcaaaaaaacaaaacaaacaaacaaaaaaaacaaaaaacaaaaacaaattaactgttttttgtcactataaagttgtatacatttttctagaattgcatataaatggcattacatagcacatactgtttgtccttttttttggaggagggggggttctggcttctttcactcatattatgcttatccacattgtgctgtatataatgtttcacaatattactcaatttatggatataccatagtgtgtgtttatacattggactgttttcagtttttgttattatgtataatgcagctatgaacatttatgtaagagtacaatgtacattctcttggacaaataagagtggaatggctggataatgtactaggtatatgctaaatgttctaagaaactgccaaacaataatcaaagtggttgtaccattttatatgctcaccagcagtgtgtaagagtcccattgtttccatatccttgccaatacttgttatgggcagtcttttccattttgccatcctaataggtatatagtgctatctcattgtggtcttgaattgcatttccctaatgaataatcatgttgagcaccttttcatgtgtgatttttcatctgtatatcttttttggtgaattctgtttatatcttttgccaatttttaaaaattacatttttttcttgagtgtcgagttctttattctgtatacaagacctttatcggatatatggtatacaaatatttgcttccagtgtgttgtttgtctttttattctcttaacagcgtcttacaagataagaggtttcaaggttgttttttaatttttatttaatttttagagataggatcttgctctgtcacccaggctggagtgcagtggcatggttatagctcaccgtaaccttgaactcctgggcttcagccatcatcccaccttggcctcctgactacctaggattacaggcacgaactaccctacccagctaattttttaaaaacttttttgtagagatagggtttcaccgtgttgccgtggctgttctcgaacttctgagctcaatcaatcctcctgcctcagtctcccaaagcaaaggtttcaaattgtggtgaatataatctatcaacttctttttatgggtcatccttttggtgtcatatctaagaaattatttacataccaaggatacagggttttcccttatgccttgctctggaagggttacagttttaacttttacatttatgtctgtgatccattttgagttaatttttgtatatgaaatgagacatatagtgaattcatttatttttgcatacttttttttttttttgagatggagtctcgctctgttgcgcaggctggagtgcagtggcacgatcttggctcactgcaacctccgcctctgtgttcaagcaattatccctgcctcagcctcctgagtagctggaattacaggtgcccgccaccacacccagctaatttttgtattttttagtagagacagggtttcaccatgttggccaggctgatcttgaactcctgacctcaggtgatccacctgcctcgccctcccaaagagctgggattacaggcatgagccaacatgcctagcctatttttacatacttctatacagttgttccagcatcatttcttaaaatgactgtcctttcttcagtgaattacctttgcatccttgtcaaaaatcagttgtttatttacatgtaggcctaattttcttcctttttactaatcaatttgtctgtcttgaggttgccaacccaaggcccatgggccaagaaaagctcacagcctgtctttgtatcatctgttagataagaatgcttttttctatttcttaagggttgtataaaaaaaaaaattaaaggaaatgtgacagaaaacatgtgtactgcaaagcctaaaatatttactgtctgaatcttctcagaaaaagaaaatttctaaacttgacctatcttgacaccaataccacgtcttgattattgtagttttataatctattaaaatcaggtaatgttagtcttccaacttactttttccttttcaaagttgttttggctattcttggccctttgcatttgtgtatgaattttagaatcactttgtaaatgtaaatttcttcaaaaagacctgctgggatttttattcatattgtattgaatctatagaccaatttcaaaaaattgatatcttagcagtattgagtcttttaactcataaacaaggtgtgtttctttatttctttagattttctttaacttctctcagaaaagttctgcagtggccgggcacaatggctcacgcctgtaatcctagcactttgggaggctgaggcaggtggatcacctgaggtcaggagttcaagaccagcctggccaacatgctgaaacccagcctctactaaaatacaaaaattagctggctataatggcgggtgcctgtaatcccagctacttgggaggctgagacgggagaattgcttgaacctgggaaacgatggttgcagtgagctgagatcgcgccactggactccagcctgggcagctgagtgagactccatctcaaaaaaaaaaaaaaaaaaaagttttgtagttttcaggttacaaatatttcacaacctttgtcagatttatcattatgtatttttgaagctgttgtaaatggcattgttttataaattttaatttctaattattccttgctgcaatgtaaatgtacagttaacttttgtatatttatcatatattctgtaatattggtaaactcacttattagtgttaatggctctttttaaaatttatttgtattgtatatatagttgataatgtcaaagaagagtaaatataattttccttttttttttttaatctggatgctttcatttcttttcttatattattgcactggctgcaatctctagtataatgttgaatggaagtggtgagagtgtacatgcgttttcattttaactcatattatggggaagcatttggtgatcttccattatttatgatgttagctgtaggttttctgcacatacctttatcagtttaaagaagtccctttctatttcacatttgctgaaagttttaatcaggaatggatgttggttttgtatcaaatgctatttattaatccattgaaatactcatttttttattttttagtttaatatggcaaatttaactgattttcaaattttttttataaaaacatgatatatttttataaaagtatattaaaaattattcgtatatatatagttgaacttaattagcctgtcattttctttttcttttttttttttttgagacagagtctcactcttgtagcccagtctggagtgcaatggcgtgatctcggctcactgcaacctccacctcccaggttcaaacaattctcctgccttagcctcctgagtagctgggattacaggtgcccaccaccacgcctggctaattttttgtgtttttagtagagatggggttttaccatgttagccaggatgctctcgatctcctgatcttgtgatctacccacctcggcctcccaaagtgctgggcttacaggtgtgagtccctgcgcacagcctattctgtcattttctttcattgtctttggtttctatatcaggataattctgacattatagaatatattgggaagtattcccttctctccaattttctgaagcagtttgtatagaatttatattattgtttccttaaatgtttggtaggatttatcagcgaagcccttgggcctggagttttctttataggaaattttaaactccaaattcaatttgtttaattgacaaagggcttttcaggttttctattttttcttaagtaacatttggtagtttgtatcttttctgagatttattatttctttaatattttgaaaatctgtgctgttgtaacctttcttattcttgatagtgacaattcatgtcttttttttttttttccaggtcagtgtggctagaggtctgtaagttttatcggtcttctcaaagaactaacttttggtttcattcatatttttgtttgtttgtttttgagatggagtcttgctctgtcgcccaggctggagtgcagtggcgtgatctcagatcactgcaagttccacctcctgggttcacaccattctcctgcctcagcctcccaagtagctgggactccaggcacccaccaccacgcctggctaaatttgtttttgtatttttagtagagatggggtttcaccatgttagccaggatcgtctcgatttcctgacctcgtgatcttcccgcctcagcctcccaaagtgctgggattacaggcatgagccaccgtgcctggccacaggtttcattcatattctttattgcctttcagttttctattttatttggtttctactcttatcgttgttatttcctgtattctacttacttttgctctctttttttttttttttagtttcttatgatggaagctgaaggcattgatctgagacccaccttgtttgtttgtttgtttgtttgttttgttttgttttgttttaaagacaaagtcttgctcttgtcccccaggctggcgtgcaatggcgcgatctcggctgactgcaacctccgcctcccaggttcaagcgattctcctgcctcagcctcccaagtagctgagattacaggcgcttaccaccatgcccagctaattttttgtatttttagtagagacggggtttcacaatgttggccaggtgtgagccaccgcgcctgtccgagacccatcttgctttctaatacagtttaatgctatttctccttcaagtattatactattttaggttcatcccacacattttgatatgctgtgttctcatttttatccatatcaaaatactttctaatttttctttaagtttactgagacttgctttgtgactcagactatggtctgtctttgtaaatattccatgtgtgcttgaaaacaatgtatattctgctgtcgttgggctgaatgttctataaatgtcaattatgcataatagtattttttaagtcttatatccttctcgattgtctatttatttgttctttcaattattaagaaaggggcattgaagtctccagctaatatttgttctatcaattattaacaatggagcattgaaatctccaactatagttatagattttttttatttctcctttgagttctatcagtttttgcttcacttattttgaagcttttttattaggacatttaagattgttgtattcttttcatgaattgactactttattattataaaatattctttgttctgaaatatattttgtctgctattgatatagctattgcagctcacttttgatagtgtcttttttcattcctttgcatttaacctatttgtgtccttatatttagagtccattttttttaagagaacttgttttggggtatttaggtctttataattctttttattgtgtctgacaatcttttgcctttttaattgtggatatttagactgtttatatactttcttgatatggttatgtttatatattttatcttattttttcctatgttcctctgtattctttacttacttttccacattttgtgccttttaaaaatcagttgagtatttttaaaggccgggagcagtgtctcacgcctgtaatcccagcactttgggaggccgaggcaggtggatcacttgaggtcaggagttcaaggccaccctgtccaacatggcgaaaccccgtctactaaaaatacaaaaattagctggatgtggtggtaggcgcctgtagtcccagctgcttgggaggctgaggcaggtgaattgcttgagcccaggaggtggaggttgcagtgagccaggatcgtgccattgcactccaagctgggaaagacagagagactgtttcaaaacaaataaataaataaataaataaataaataaataaatttaaaaataataataaaataaaatagaaatcaattatttttaatgattccattttatctcctttcttggcttattagctgtaggtctttgttttttggttttaattgttggttttggggttataccatatcttcaacttataccttcaagtgatatactacccattcatgtataccataagaatcttacaagtgtatacttttgtttcaactctcttgttgtcacacaattctacttttatatatgttctaaagtctatactatattgttattgatatttaattagttaattgttctttgaagaaacttacataatataaattttttttttttcttgagacgaagtcttgctctgtcacccaggctggagtgcagtggcacaatctcagctcactgcaatcttcacctcctgggttcaagcgatacttctgcttcagcctcccgactggctgggactacaggtgcgcaccaccatgcccagctaaattttgtatttttagtagagatgggatttcaccatattggccaggctgctagctgtgctacaatttctggtgctcttcattcttctttacatagatgcatttctatgtaataccatttgccctcttcctaaaggttatcctttaagatttctgtctttttttttttttttgaggcggagtctcggtcacccagactggagtgtagtggcatgatctcagctcactgccgccttcgcctcttgggttcaagcaattcttctgcctcagcctcctgagcagctgggactacagatgtgcaccaccatgcccggctaatttttgtatttttagtagagatggggtttcaccatgttggccaggctggtctggaactcctgacctcaagtaatctgcccacctctgcctcccaaagtgctggggattacaggcatgaactgccacacctggcctaacgtttcttgaagtacaggcctactggtgattaattctttcagcttttgtatatctgaaaacatcttcattttactttaatttttaaaagacatgttagttgtgcatagaactagcggttgatactttcttttcccttctcccagtactgtaaaaatgtttcacagtctttgcaattgcattttttaagtaagaaaattaggtatcattctaatctttaacctctgtatataacctgtcatttttcccctggatgctcttaagaatttcttttatcactagtattgagcaatttttttatgatctgcattggtgtacttttctttatgtttcttgtgcttagggttctttgagcctttagatttgtggttttatagctttcatcaaatttagaaaatgttttatcctcataggactattctgattctcctcagctagtaatttctttacctaatggacccatttacaaaatacactccaggtcctataaattttttttaataggtcatataaaagttactaccaggaatctgatgtttatagtgacagaatcaagtctcgacacttggaaaagaacattgtctgttttctcttgtaaactctgggattgctgaggttttcaaggaagccaggtactaaaccactctgctgttacagtcactgttcttctttttggctttcctacctcctgagattcttggcagatgaaggataagtgcttcataagcctgaaatggtggcccttctgggtcctgtggtaatcatctgagcacgtacttttcatttctgagttagtacggagattcctgaagttctgtctacatctttccaatgttggatttatacccaacatgtaggaatataaaatttagtgctaagatgataggtgttcactttgttccaatcctgtaatttgctgtggtgacatacaagggaaagagaagagccttaaatatttgcctgctagctatcaagtaggggggattatactcttaatctcatttacattttcttgtagctatagcaaagtttgacaggcaatcgtcatatcccccaaattatattagtgtgccagttacaggtctgtgactcctaagtattatttttaatacttaggagtattttaatactcctaagattatatttaaaaaacataatctcaccagtacatttttattccttcctttttaataaaccagctttgacagatgaaaaggaatctgtgctgtagctcagatttctcatgttaggcatattttagccgtaaacttaattatcgcaggaattttcaaatgactccaactttttctgcacttggtatcagaggataccaagtcctgtttttgagctgataaaatcctccttctgaaagcatttgtttattatattactgcttcacatgagctgagctctatcctgaccccgtgttaagtgtctgtggtagatttcattacatccatatactggaagtcctgccaatacactggcagcaaaatcctagtggaaaataaatggcaataaaaaagagaaatgatagcctgtgtgagtggtgaggagcacagctttattgagactggacaaccccagagtagtgacttggcatgcagacatgagcttaagagagtgtgagtgaaagctgatattggaataacgactctgtggcacagacatgggaataatttaattaattgcactgaaatttctttgatgaatagttatgtggtgataagcatgaggtcgaacagcagaatgagtctcagctttttaatgggccagcacagctgcggttttggatgccttcccactttatttctgcctgcagctctccaccgctttattcatccacatctcagctaggagcaccactcgcggggccccctctccatgtcggcagagctgaggggcaagtacatttggccatgggaagcaggctggtgactgctttgaaatgaaaaccagatcaaacgaaaattgtaggatggtgtccttatgatgcctgcacctcccctcctccccaaatctctaggatgcttttacagagtctttgctgctacgttgtataaagattttaataaaaatttcttgtccctggagaaacaggcatgtctttgttgtcagagagctagagggaaatgagcaatgcagcccagctggagtaccagcattaatcccatgattcgtagcccgtattttcagacagatcaattacttatggctgtaaccaatctctcatcgttttcttgctgtgcagggctccatttccagactcggcagctgacataaccttccaacttgataggacttcagctgcaaatctcttcaggtctgctgcctccattcatcgtggttatacaaatgagttgttaaataaaaatcaaaagtaaaaaattatgggtggtaatctctgcctggctcagtaatacccatgggcctaggcaacattttcagttggatttttaaaaaacaagatggatgattcacttgtctgacttccttcacttttatggacaggctttgcatgagagaaaagccatctctagagggaagaaattatccacagtggatacatttcttatcaatttataagttgaaagattaacttagaagtggagagaaaggagattatgaggagacacgaaggacatgtacaggtgagctgtgtctaatgcatttcacactgagtgagtcaccccttttcagctgctaggctgcctgggcttaaggccaggagattctgtatcaaaaagaaatgacccttgctaacacagaggtgtcatggaacatgtaagctgtttatagagtatgtcactgtgtgaatgtagaacttgtgtgaaggatctaaacccaataacctttgaagaatttacccagaatttatttagtgttttcaagttataactactccttgtgtgtattgaacccttcacagctatgtcaggccagctaagccttcctggaagaggtacttaggggccagataaagcaaattggagaatctctttgtgatttgactcactttagatgcacagatgctcatctgttaggaaagcatgtattgactctctttgtgcccttttctttcattgtcactccatcatttccatctcttcaatgaatagtcctttgaggactttcccattttccctataataaccaactacgaaaatttgcaggaagcaaaaaggaaaatgtggacatctagagaatataaatggttttatgtttaatctagggggaattatgtatgtatttatatatatttgtgtatgcgccctgcatgcttgttgcattttgctgtatgctttagaaacctttgcctacatggaacccattagtagtgtcctgggacaggtattcatgaactctgttaacaattaaggaagtaagttcctgctgctacaggctgacagccacagtttccccttgggcttgtatggctttggattgattctaaagaagcaaaggaaacatacagaacatacttgtttgatttgaaagttaaaaaccggtctgtgtctgttttcttctcccttttcactctagcccttcttaggcatcccaatgcgagtagtaaaacataaatcatgcaatatcataagatactgctacagctcttgccctgccctggatttgtttttttgtgcatctgaattttattatgatccataaagcagtatggaaatggctcattggtagggttgcatggcagtaccccatcctcagaccctgccaacaattgaaagtctgagaggtaataagaaataaaagggagatgagatttatagttcgtgagttcaagttgcttttttttctccgtggaatgttgcctgtcttattaggagttctttagtgaaacaaaatgcagtggtagcttagagaaattatggatactttccaggggtgtgggagaagcttaggagtctgtaagccttctcccctggttgcagttaggaagccagttgacagtataataggcttttggaagtgggtgcaatggtttgtgtgttctgtttgatgttgcaaataccaagcccgcagggagatctgcaaagaggatattctgttcttaaagaaaggaaaagattaacctgaaacgtgaactgaaaaactcctgaattctagaggacttaggtgcagccaaggaaggatctcatttacttacgtggaaacatcatttggcaagctgcctgctccagacaagcagatattttttaatgatttcaattaatgaaaagcaatcactaataaacttgagaggattggatcacatattaagagtgtgtgtgtgtgtgtgcgtgcgtgcgctcacgtgtgcgtgtgcagtatttgcatggttaaggtttggaaatacgtgcattctcatacacgcatagaagtcttacaactacgtgtactacttggagcctgcctgatggtccttttcttcacattcagaatcatgcttctgacccattaggagaggctaactcttgttattttggagacattttcaggagtggtaatgaatgggcattaaggcacttctgttattcatgaatatgtacattcacttaacatatttattgagtacctactgtatgccaggtattatgctaggtgctgaggttatagcagtaaaaaaataaaaagatacatagtctctgctctactttagtttataggttattggagagacagacaagaacaaataataatacagttatacacttaaaatttttatattgcctttgtattcaataaaaatttgttgagggcttctagatgctgtagactctgtgatagagtctaaagaaaagcgtcttgcctaatttctgttaaaatcagtggtttgccatttacgaggaataaactggccatgtttagttatggtattgaagaaagggtttgatccatacaggaactatacttcacctctatgtattaatttagtacacagttttaagaacagcaaggtagcattcaagaagagcattctgttatatacttgtatataaaccctattgtatctactaaggatattgttataacttcctcttcactggtatctcctcaactctgagttcaagacctacccttctctccagctgtgggaaatgggatttgtcaacctctctgagacaaagtttcacatcagcaaaatgggaatagttgtactagttcacacggggttgtaaagagtgaatggaattgtgtatttgaaaacacttcattaaagggatggatatttcaagtacactgatttaatttttacaaataatatgaatgtattagatcatcacatgtaccctgaaactatgcatatcaattatgcatgaataaaaaaattgttgaaaaagccggtcgcagtggctcacgtctgtaatcccagcactttgggaggctgaggtgggtggagcgcctaaggtcaggagttggagaccagcctcgccaacatagtgaaaccccatctctactaaaaatacaaaaaattagctgggcatggtggcgggcgcctgtaatcccagctaactagggaggctgaggtaggagaatcgcttgaacctgggaagtggagtttgtggtgagccgagatcgcgccattgcactccagcctgggcaacaagagtgaaactccatcttaaaaaaaaaaaaaaaaagaaaaaaaaagaaaaagaaaatactgtgtaaaggactatactcatttgagtttgtataattttcattattattacatcagatttacagagagaataaaatttattgaagccaactgtgttgtcttaaacctccgaaaattcagaaggaggataatgctgagttcaagtacgatatagaaatcatcatatcttttctctagcaagtgttccaagagaattagaatataatgccaaaattaaggtagaaattaagttattctagaagtgggatagccagtgtcagcatgcatgcatgatccttgaaaagtgatattgggcagcatttacaccaagctttgctatcttacgttctctttttgcttcttctacctggtgttatttgtgccttccctaaagggctgaaattgaaaagaattagtacgaatgcattttcaatgacaccttggccaagaggttcatgcatttcagctttggacaaggtgctatggttcaaatactcatgaatatgatataagaacagtcattatttaaatgatgaacctttatatgagattacactgggtgttactaatctgcaagttgtattttctgtggggaaaaatcagtatgaatgaatcaagaactcagtgtgcatcctgcagtgcatgttgtatttgcatgaacggagatgtaatctcttcaccttttgaatcattttgtttaaaggccctatatagatcattctgctcttactggtgggtgacattttcttaaggttctctccctagatagactaatttgaaaaaaatgcatccctcttgatgtctgcatgtgcatgtgtgtatgcatatgtataaaatatagaggtgatcacaaagcatactgggccacttagcacttccactaattccacattatcagagattgtttggagagcatatttcattctccctactttgtcacttatttctaacactgagtatatctgtacagttcttaatagtaaatggcataatatcttattctctgtattctatacattgtcaaccccattcctagctgataatcagtagtcaaaaatgggtgaataatttgaatggtacttgtctttaattgtgattcatgtctgaatggcttgctggtaactaggagctaaatttaatgttaatccaaggtcacactctagtccacatactggaagctcagcctcttgacatgcatgcttcatgcaattatcaggctgctcccttgtaggataaagtgcggcagtctagaaagcatggcactcaaatgggaagaactgttggtgagtctgtacagaacagatgaggttgcagatatttgaaagcatttgctaatggaaactctgggtaaggcagcatcttaaataatacgtagaatcagcatgctgtctccaaaacacatttgcagcatttattagctgggtgtgagctaaaggtaagctcccattaaaagaaaaaaaaatcttcgtaatgattagcaggggcccagtataatttaaggtattctttggagtttataaatatggcctcataaaaagcctgaatataagagaactgtgactttaagtcattagaagcccagtggtttgataaaataacaggaaacagacaatttattatgagcagtctcagtagctctggattatctataaaacttttacggccttccccaagtggcaagaagccataaaacttgcctgaatgagggacttgttaatttacttgttaaagcaaattaaaaatttataagtgcttttaggtaaatgagatcttctctcattgctgcccttgcggggctgggagtcctaggaggggagagtggatatgcttagacaccactgcagaacaataaaagctattaaatttttccagtttattacagcagagccatgcagctgttgccatggctagctgtggggtaccggtggttgacagcctggagtctcactcaaagggggaaaaaataaaaagccaaggaaagggatgattttttacttttataattctccaattgttgatgttgtagaccatgtctttttatttttccttgaccttgtaaatccagaagttttaaacttttttcttttctttttttttttttgagacagagttttgctcttgttgcccaggctggagtgcaatgtcacaatctcggctcactgcaacctccgcctcttgggttcaagcaattctcctgcctcagcctcccgagtagctgggattacaagcgtgcgccatcacgcccagctaattttttatttttagtagagatggggtttctccatgttggtcaggctggtctcaaactcccaacctcaggtgatccgcccacctcgacctcccaaagtgctgggattataggcgtgagccactgtgcctggccttatactgttttttcttatccccagaagtgtttctgtttattttgtcatacattgttggtccttgaaaattcctgcccgtcatgattccttttagtcatttagtccatggacaaaggccaggtcttaggctgtttttgttaacctcaacatttcttgaaaaaaacctctttctctctcttttcctttcccatatctagccacaaaactaggagaaggaagaaagggaatctggtacatgttcttgtgtatttaactccaaaaactgttagaatcaatattttttgtggaagccaaagtttataggtaaaggcagattttcttgcactctcccttggatgaaatgtcagcgtaggttaaaattcttggatcttagcatcttccttaacttagggctgttctctacgtgttgaatttcttctgtaataataggtttctgaatggtgactttggctggtgggggtcatttttttggctttaagccctgtgactcaggggattttttttttttttggctcccttaaatacaattcacaatgagcagttttctccctgccctagtgacagtaaggtttctgggacataggaaatagcttattcttccactcagatcagaagttttgattgagctctgtggcatttttaaggcagaaaaagacacgttatgcctcaactacctaccctatttaatgttaaattaaaatgatggttatttttaaagtgtgtttacatttaaaaattcctccagaaaagtcaagttctgcaaacattttcttgtagtatttccagtcactgcacaagaaaggtacattttattagttttaagaacagaaatagtagaaagacataattggtacaagtgtttgttcttctacagtatttactcttcagtttttacatatatatccatacctctgatttgtagtttgtttggaattatgtttagaaaagcatattgttggcaagtaaagcatcacaaaattaagggtagagaacagcagtaaaaaaaaaatgacaaatatgtatttttagactgtattccagttttaggaggtatcagcttttagagattccttaacgttaaaatttgtttcagtaagtaactcttgttgtggtcgctgtcttcagtattccagaaataatgctgtatctcttattcaacttcatgaacctctttactggcttccatattaatgtcatttgcatttagagtgtgtcatcttcatttagaatctcagcaaaaattctggtttataaccatctttgcacaaattatctctgtgctttaggacacttttctgggcctggtcttgcattttttatgaatacaactttaagagtggaacttaaatatgtccccttttattggattatccccatagacctgaccacaaagtctgtggaagtagaaagctataacggttgtaccatttttttttttttaaatactttaagttctagagtacatgtgcacaacatgcaagtttgttacataggtatacctgtgtcatgttggtttgttgcacccatcacctcatcatttacattaggtatttctcctaacgctatccctcccccagccccccaccccacaataggccctggtgtgtgatgttcccctccctgtgtccatgcgttctcattggttgtaccattcttttgttcaagagtatcaagttgaatttcatgtactgaaaaagtagatagatttaaaaacatttaaatttaggtagcaaatgacattgggccaaaggtccattgctaaggagacccaggaaagaatttattacaataggaatatgaggtgtggaacccaaggacagctgtcatgaaggataggtaatcacagtaaagtagtgatgcttcatatacatttgtttttgtttttgtttttttgagacagagtctccttctatcccccaggctggagtgcagtggcatgatctcggctcactgcaacctccgcctcctgggttcaagcgattctcctgcctctgcctcccgagtagctgggactataggcgcacaccaccacacctggctaatttttgtatttttagtagagacggggtttcaccatgttggccaggctggtctcgaactcctgacgccaggtgatctgccagcctcggcctcccaaagtgctgggattacaggcgtgagccacttcgcctggcatatatttggttttaagagttcaagctagaattttagagtagatgttcactcattagtaatattgatatatgttgtataatgattgcttaattgctaattttcttatgctaattgatgtttttctataaaaccaaattcttcagctctttacatttattgaatgctatctggcttatgaattttcataagaactgccaaaaaaaaaaagaaaaaaaggggcaggtcccctccttccttctaaaaagagtggttcatgcctgtaatcccagcattttgggaggctgaggtgggcagatcacttgagatcaggagttaaagaccagcctgaacaaaacagtgaaacaccgtctttactaaaaatacaaaaattagccgggcatggtggtgcatgcttgtaatcccagctacttgggaggctgaggcacaagaattgcttgaacctgggaggcagaggttgcagtgagctgaggttgtgctactgcactccagcctgggtgacagagtgagacctatctcaaaaaacaaaaaacaaaaattaaagaaataaaaataaaaaggtagagagtatgtctataatgactttttaatgtgtcagggagtttttaataggaaaaaaaaatcattccactaaaaatatgtcctctgtctcccaactagaatttcttccccatgtcactgccagccattgctgtgacaatatagtctcttactcttttatcaaatattctccatattattgctgtaagtactggacagatatcataagtaaaatatgtccacctggttgctaagaaaaatcccacatttattttatatattttgtaatagctttacgtattcgttcaaccgtaacattttggtttaaagacttcattaagctttcattgtccaatagcaaagaagtatgaagtagataccccttactttgcagtgtttactttttttttttttttttttttgagacagagtctcgcactttcgcccaggctggagtgcagtggcgtgatctcggctcaccgcaagctctggctcccgggttcacaccattctcctgcctcagcctcccgagtagctgggactacaggcgcctgccaccacgcccagctaattttttgtatttttagtagagacggggtttcaccgtgttagccaggatattcttgatctcctgacctcgtgatctgcttgcctcagcctcccaaagagctgggattacaggtgtgagccaccacacccagcctgcagtgtttactttttatttattttttattttttggtgatttccttttaccattagctaccagctgtcaggtattttcatatagttttggcattatagtttctttggttagatcacacacacacacacacacgtacgtatatgtattgtaggtataagcactggaatttagcagagctttttaaataaatgggctagtctacatgcctttctattcttttccttctaataatcttatactaataagattatagttacaagtcagacagcaatttcatggcacctgtagattttgagtaagaaataaaactaacttcagttgattatagttttttttccatcattaatttaatccaaatttctttaagatggctaaggtaaatgaaattatattctcaattgcttgtctggtctaatatgaccaaaaaaaactgttagagactgctttaattatttgaagtgtttgaagaaatttgagagagtattgtagaatttattcttatattaatgcaattaatatattaagattcaaccacatcaaattatgtattagtcatccagaattgagagacatggttgtaaaaatatcattaaggtgtgtggtatttacttaaaatttattcctttagagataccagaataattatttatatctgtttgctaattgcttactctaaatgtttggtcagtaaatcagaaaaatattagagctatccaaaggaacaaacacactgcaatgtgttataacatgcctccattgcccataaattattaatacaatgttactctggaggggtagcataatgttttggaaataatgcacactccagaataaaaaggcctgaatgtgaattctaggcccatctcttcctttctgtttaatcccaggttaacctgagcctccacttacttaactctaaattagtaataattatatctgcctcacaggttctgagaggaacctgtagctcagtacagcaaatagtaggcactacctcaagggcagtaaatagaatattcagtcagggatccacgttctaggctcagcttaccacccaatccctgggtgtcttggtggagttgttcatctctctatattttagtttctttgtaaaggggatacattaaaatttacttttctcactttaaatatttacgtgaggattaaatcatttatgtacaattattagaaaattgtataacagtaggctgggtgcagtggctcacgcctgtaatcccagaactttgggaggctgaggtgggtagatcacgaggtcaggagttctagaccagcctggccaacatggtgaaacccctatctctactaaagatacaaaaaaaaattagccgggcatggtggcgtgcacctgtaagccaagctagttgggaggctgaggcaggagaatcgcttgaacctgggaggtggaggttgcagtgagccaagatcatgccattgcactccagcctgggcaacagagtgagactccatctcaaaaaaaaaaaataaatgaaaataaaaataaaatagtgtaagagtagacaaatgtgtacaacattattatcacaaaaatgaaagcagcttaatggtaattgatcatcctgtttttaagctactagatcagagaatgtgatgtgcccacttgtcctttactgtccttatgatagttgtctttccatgttggcacaatggtagaagctgctgtccaggctattttgggcaatttgagtcaaaaattagcagttattcaatatatacaccttttttttttttttaccagcagctcaatgagggtttctattatatatcaaggggctaatgtggcataagttgttttttcttttttttttgggaaaaatcctaactagaaaattgggtctgttcttaaattgtaaatgtgtgtacatcaaagccattgtaaggataaatttaagtctgatagtgtacatgtgtacatagtttcagtacacattggcgaaatatcctgctgattgctgattgaaaacagttgttaattctctacttcactaaattcagagtggaaaactttccttaatgaagaacagattgaggagatccaagaccttactgtgtgggaattaatggcagatgcatatactggtagttaaaatgtttcattagatgttaatgtcttgctgtgtttttaattgttcaggaattagcctctagaatattaaaaccatctgtttgttatgatgaaacagaatgcttaaatagttattaatttgtgtttcttgtctttttttgagggataatctgtaaaactttgatctgtttggagtttagggaatttggaatgtggaagtgaaaaataattttaaagcacaccagtgtcctgaatagctgaagtatgtctttttttttctccttacccactgcatatattttgtgttctttctctcttttttcttaaaggagggtgagttgactttttttattccatggtgtgatgagaatctattaaacagagctggtttaatagttgatttaaactttaagattatcttcgtgcatgtggattattttacattcaacatcaaaacagaatttagacatttagaggaatgaaggacagcttacgtttttaactctaaggatgtacttttactactatattccactagctctgcataactgttgatggctatacagactactgctggcatgggttctagtcttgactctgctgtttcatgccttgtgatctggcacagattagtctttctcagctttagtttatttgtctgtaaattgggaagtacaatttaatttatagcattttttttaatgcttagaagtaatacatgaagactgcatatttgtcttttgttttgtttttatagagatggggtcttactctgtcacccaggctggagtgcagtggccaatcatagctcactgcagcctcgaactcctgggctcgggcaatcctcgtgcctcagtctcctgagtaactgggactacaggcatatgccacaatgcctggcagtatttaaattttttttagtgattgagtcttgctatgtttcccacgctgatcttgaacttgtccctcaagtgatcttccagcttcagcgtcccaaagtgctgagattacaggcataagcacatacccggacccacatttgttttatgtagtgggcatattaattgctgtctttcttgattacatggagccagtgagatactttggatgccactgagaatatacattagcactgtagctgcaagagccagaaataaactcttcatttactggcctctcccctgtgttgatagccaaacagtggtgcatttaagttcttacccccaaaatgaaaatctcagctaatgtcatcttggctctagttaattgccaggtgtgtagagctacagtggagagaacaaatctacctgtgcatgagatcccaatttatgtctctgggggccctagtatttgtctttttgtctgtgagtttggctaagaaaaattttcagcttctcataaatttatattaatcagtaaaatcatgccaagaattagaagttttatatagttgaatctttctgcatcttggagaaattccatgtgtttagaccaaaaatgaatgatagttgggaaattcatggttctctttacgtttcctttacctcacttgcccctcaatcaaaactgaattatctcatttcctaagtctgttttgcgcaggttaaaaatgggagggtctttatacatcttctggagctgagtgaaagtcacttgctacatgaaagtgaagtttgttgtaaaccttgagtctctaattcaggttcctcagaggccaggctcataatgtgaataagtgacacaggacaatgtagggtgtggggtcgtccttgtcatggtgctccattgaccctttataactatagcattagtgcagttagtgctcttgtttccaggggcacacccccttgctaactggactatgctggcactggacgtcatatgaatgattcattcagtattaaaagaagaatcaggccaggtgtggtggtgcaagcctgtaatcccagcattttgggaggcccaggtggaaggatcatttgagcccaggaattcgagaccagccttggtaacgtggcaaaatcttgtctctcaaaaaaatgtagaaattagccgggcatggtagtatacacttgtagtcccagctactggggagactgaggtgggaggatcactttagcccaggagttcaaggctgcagtggggtgtgatcgtaccactgcactccaggctgagcaataaagtaagaccctgtcttataccatctccatagaaagcaccatcttaaaaatttacccaggatttcttttataaaggttgttgttgttatttttattattaagaaatcagtgattgttagtacacattttaaaagctttctgtcattgcaggatatgtcagaaaaaagtttttgctgtagtgatctttaacaacataagaaaaggagtggttttttttttatacttgttaggtaaaataaataggatttttaaatgcttcatattatccaaattacataaaagtggcaatctcgtcagtaagtatgtataatactaagagagctattaacttttcttggtagtggtttttgaccttttgctgaacaagtactttaaaaattttcaaatgccaggatgaagacttcttaaactaactgtaattatgcaactttttctttataatccgatacctcactatctaaaatatctgaaattacatatgatcactgtttcaagaacaaaatcagtgatagcacattttgaagactatggaatctaaaggctgattttgtatgctcactagcacacatgatacttttcatgttaccattcagcttttgagctctccttactggccaatcccagatgagaagctttttttttttttttttttttttctttgagactgagtctagctctttcgccaggctggagttcagtagcgtgatctcggttcactgcaacctccgtctcccaggttcaggcaattctcctgcctcagcctcccgagtagctgggattacaggcacgccccaccatgcccagctaatttttgtatttttagtagagatggggtttcaccttattggccaggatggtctcaatctcctgacctcgtgatccgcccatctcggcctcccaaagtgctgggattacaggcgtgagccaccatgcctggcctcacaattaagtttataacagggatatgttatgaacttaatatgcttggctattaatatttggatatgttctcaaatattctagaacataggccagatgtggtggctcatgcctgtaatcccagcactttgggaggccgaggcaggcagatcacgaggtcaggagatagagaccatcctggccaacaaggtgaaaccccgtctctactaaaaatacaaaaattcgctgggcatggtgggcgtgcctgtaatcccagctaccccggaggctgaggcaggagaatggcgtgaacccagtaggcggagcttgcagtgagctgagattatgccactgcactccagcctgggcgacagagcgagactctgtctcaaaaaaaaaaaaaaagtttaactctagtgtgtggtataccagttcagttctgtcctcatggaagtaatatggcctttcatgggatagtcactaatgataagtttagtgacatatagtttattaagatagctatggacagtgtaggggcttagtcttgatgagattttaatttttggctgcacttgaaatgaactgggatcaaaatagtggcaagttggatagagatttgctgtcagaattaatattcaagaagttctgatagcttgcaaccaaagtattttatattataacaaattctagatgctcataattattcaattaaaatggataaacagtaaatatatgggttagagaagaacaatgctttttccagaaacaaagttttaaaaacttgttaatatggcaattttaaaacatacatgaaagtaaagataacggtataatgaacccaacatcatctaacttcaacaattaagacatggctaatcttacttcctctatatccctacacttcccccttcccaataggtattgctccccctatcccctggattattttataaaataaaactcagactcaagttatctcacccattaatgttttactgtgtatctgtaaaggactctgcttttttactgtaactacaacaaaatgtaaataataattccaggccgggagctgtggctcatgcctgtaatcacagcactttgggaggctgaggtgggtggatcacttgaggtcaggagttccagaccagcctggccaacatggcaaaaaaaaaaaaaaaaaaaaaaaaaaaaaaatagccgaggatggtactcaggaggctgaggcatgaaaatcacttgaacctgcctcggcttccgaaagtgctgggattgtgagccaccatgcccggcccaaattgttccatttttggtcagtgggaaccccttcagtttggctcccaagcccctttgtcagggtcttgctaggatgacaaggtgttccagactcatcttacatatttcctttctcagaccttcagttggacacttttagttttttcgtgttagaatgggaaaaacaaaagatagaagacattttctatttgagagtggtggctattttaatgaatgacaggccatttaaaaagttattgaaacatgttttttaaaaacagaaaatcataaaaagtaagttttgtgtgtttattttttatattcatccttgaaaaccaaataatattgtctctaaattactttttaataatcaaaatcttattttaagaaagctgaaaactgtactaaagcaatcaaatattccttcaacacattattttttacattgtgtatgtgtattgtgtgtgaatttctgagcctatttgaaaacagatttatcatttagtccatggttatactcaaggaatgccaaatgcaatctgttcattctggcctttctctttaattcttgtacatcttttgtacatttctattcttgtacatctttttttctctattgtttagactttttggtcaaaaatttaaaaattttctgattggcagttggttgaaagagataatttattatctaaagatctggaatcaatagacaggaatgtctggcttactacgataaagggttatggagaccaacgttttatcatgcagataaagcctccaggtatcaggcttcagagagaataaattgtaaatgtttctcatcagacttagagagtctgctctattagtaattctgaaagggaggaggttattatggggcatgtccggtccctgtcccccatcatggcttgaatccgtccctcaggttagccttagaatgcccttgctgagaggaagagtccattcagatggtgagggggccttagaattacattttacagcataattaaacctaggaatagtatccaagttgtagatagatatgtgagttatacatcaaacactgccttttacacttccattttcttgccttcacattattaaattatgaagaaatagtatcgtaatatcctcttggcctaatcatagagagtagagttaacaattctcttgataagcagtagaacattgttaagttctgctgtctggattgagcgtgtctatagtaatgatgtcaaagtcggtcagttcgctcttgattttcttaactgcttcttatttatgtttgagactatatagttagattgatcttggcttattttcctttttaaattttattagggctgggcgcagtggctcacgccagtaatcccaacactttgggaggccgatgtggctggataatctgagatcaggagtttgagaccagcctggccaacatggtgaaaccctgtctttactaaaaatacagaaatcagccaggcgtggtggtgggcacctgtaatctcagctactcgggaggccaaggcaggagaatcgcttgaacccgggaggcagaggttgcagtgagccgagatcgcgccattggactccagcttgggcaccaagagtgaaactccatctcaaaaaataaataaataaacaaataaataaataaattattaacttagtttttctactgctatgaagtccactgaacccctttaaataatgtgcatgtttggcagctggaagcacttcagtcgtttttattttctaagctaatagcacaattttaagtcatttcctgtctaataatgcctaaagtgtttattgggatcatcattaacacaggtaaataactttccaaagtccaaacatatccaaaaatcctgtttcttactttgcattaatgaaacttgtctaattgcattagagtgactttacgatacatgaatttcaagggaatacctaactttctttctttctttttttttttttttttttttttttgagagtctcgctctgtcgccccagtcgcccaggctggagcgcagtggcgcgatctcagctcactgcaagctccgcctcccgggttcaggccattctcctgcctcagccccacctcgagtagctgggactacaggtgcccaccaccatgcccagcaattttttttttttgtatttttagtagagacggggtttcaccgtgttagccaggatggtcttgatctcctgacctcatgatccgcccgcctcggcctcccaaagtactgggattataggcatgagccaccgcgcccagccctaactttcttatttaaaatccaccatggtaagcagagttccaagatgaccctaaaagtacttgtcccttatttactcccatgttttcttatatagcacagttgactttatgaaaggaagttcttctgtaagcctgacctaatcaagtgaactattaacaggatgctgactttctggagtaagaaattaaactgatgggatctttcctttctataataaactgcttttttagaatataagttagataccataaaattcactcattgtaagggtacaagctaattaattttagtaaacttaaagagttatgcaatcatcaccatacaacattgccatcacctcagaaatttcccttgtgaccatttgcaaattggtagaatcttaaattcttgtgaaaaatcctgttagaacttggtgggctatactttaatatattattaaatttaatttgctgtgtttcttcagatttttgcagctttttaaattaggaaggtcatcctgtagtttcattttttgttttgtcaccagattttggcacaagttagctttccatattttttcatgttctggaacaaatgttgttaaatcttcttaaaaactttagactgcttaattatggttttgaaagtatcactgtagaatgtttacttctgtatttagaaatttatctgttttttattttgcttgccatctcttttatacttaaatgtgttagaggtgtatctcatatctttatgggttccccccagattatactatagtttactaactgtacaatattttaatttctaatgatgttcttctcatttttagaattctcttcctctgattttacctatacttgcctttttgtcttatttcttttttgttcatttcaatctttataattaggccatttatttctattctttcacatttaatagaaaatacattaagtccatgagttaacttctagcaaagattttacaacataagttttaaaatttatatatttataattttcattttcttaatttttaaatgttgtatgtgtgattttgtcttttacccagttgttaattgtagacagactttaaaaaaattctttaggtgatatggatattcaacataaaatactgttattactttttatcatagagaagtctgttcatataatttttacattttgaaatttattcttatattctttgttaccctggtacattttcagttggtggtaatgtcccatagatcctctaggtgtgtctctttaagttacccaatttactgtatattaactaagtcaaacttcattttttaacctctgcgtcctttttcattgttttgttttcttgttccttgattagtagaatgctaaaggctcccaccttcttttgctttcttttattatttagaatattttttactttgtatagttttgtataatggtttataacttagaagggtataaaaggtaaagactgtacctttcatcactataaaatgactttgacaggtgatttttttacctatttatttctaaccttttgtctttttccctctctctttttttaaatttaggagttctttgtaactaataaataatgggacatcaatctgttgattgatctgtatatctatccatctctctgtcttacccaacacaaaccagatttttatttttaaatgggagcttaatgtatttatattattatcagaacactttgttttacactttgctttcttgccacttttcttattttctttccctttctctattatgatttgagtcattttatatttggtaattatttggaaggcaaatatttttaacgtttaaattttactaatggttagcttcaagattatcaaattgttatttaaaacactttctctagctgttgtagatgataacaaaagaacctttgattctgtgatcccagaaaaattccttgccctgcccttgtgtccaaaatttgttaaaataattttagcttttattcacaacttggcactgtacacttaaagatacaatatagttttcttttttaaaaaatagtttttctatccaactttataattttacttattgtagttattttgtgtttgcttatttcgattcatcagcatttttcattaagttttttagtttggttcatgtacctgtcatctgaaatacgctttaaaacttaaagaataaaatagtacaaattctatccaatccatgatactttcccaatttggggacaattttatcttgaaaaataaaaatagtatttttcaagattaaatacttggctgctttgatggtagtgtagtctatgggtatattaaaattttcttgaaaaaggagaatcttttgagcttactgaaacattccccaaattttgcatagagttcatttacattcctacagaaaaactcagcagtctgaaaaaggatatgtgctactttgaggaatcaaatttgtggaaggagattccatttggacagtcttctacattgcctgcataattcgcatcattcctctcaaattccaggcatagatatattctccacataatttatccttctgtaaattttgtttgatggattaatgacacctactgggcaagtagcatctttttgaaactctccatatccaagctgaaaagaatgggatagcccagctcacaaatgccaagcagatgtgcacagaattgctataccttcatgcagtctagggtgatgggacttcgttacatgttcattagcagtgacataactgtggatcgttattttcctaattagccattaataacagttaacactgtaatgggatcacaatttcagaatttggagcatatattgttgacagtgaaatctaatgaaaaacaaactagcttcttatattttataaaagatgttaatctcattgatagaattactgccactcatgccagataccagctggctttcattttgcatattttgttctcattctggtgcccaaactattgaatatataatactctaatgggaagaagcttctcacaacagagagtgggttatagtaatttttaaataaacaaggtcctgaagtatgtaaaggctgatggtaagaaatcttactgtatcagttataggaaaagctttcttgtaatagctgccatggatgctcatacaaatcaatgcaagcagatcaatttttcttagctctttaaatgtttaagccagcatctggcctttgtgatgtttcttggttgtaggtaatagctgggaatttcaggtgaaggattacaacttctgagttagttatgctaccccaaacgatccattggatgtggctaaaatgctagtttgaaactatattcagctgggcgtggtgactcacacctgtaatcccagcactttgggaggccgaggtgggcagatcacctgaggttgggggtttgaaaccaacctgaccaacatggagaaaccccatctgtactaaaaatacaaaatcagctgggcgtggtggcacatgcctgtcatgcctgtaatcccagctactcaggaggctgaggcaggagaatcgcttgaaccggggaggcggaggttgcggtgagcagagatggcaccattgcactccagcctgggcaacaagagcaaaactccgtctcagaaaaaaaaaaaagaaagaaaatatattcatgggattggaaatgaatacttctttgcctgaaatcttgtggtttagctttagtacttactgtagtcagttcatttctttgaaatattgagctgtctgacagcttaaaatcctaagtttcctttaaacttgagcctggctttggaggagaagggggtggtgtaggggtggattttatgtaaggctctctgaagagaattcactgaagtgttttttgctggcagggcactgggaaggctagcaggctgcttcctctcagtccttcttgggttttgcccttagcctagatcaacatttagtcagataatttacgtcaggtccactgaagtctgtttttgtgccttggtaaagtcatcattttccttccgtgaagaagcatggaaaaggcccaggtgcaatgtccaggttttgttaagccagttggatattaggaaaagccttgacactctttatagtcttagttcccagctggatatgtatctctcatctaagttgggaactgagtttttattattagttttttaaatagagacggggtcttgttatgttttctgggctggtctcgaactcctgggctcaggtgatccccccgcttcagcctcccacagtgctgggattataggcatgagccactgtgctcagccataaaggtgttgatcaaatatcacctaacaagattattttctttgtgaacgtactatagtcaggtaccacatacaaatttagaacatattatgtggagagtactaatatgctgcagaatcattacttcatgtcaaatgtaaacatctaactgtgcactgagaattagttttttcatccataccttggaggtagttctacctgcccttacttaactcagaatcagtgggataagagtttgatactgcttatgaattggagggcccatgccacatgcaaactttattatcagtataactatgttataacaataggctttttgagcttgaaaaatgtgtcataatttaaaaaataaataatagaaagaaagagctcttcaaagaccataacagaggaggtaagatctgagctttaaaaaacatcttgacatcagaagcacagagaaggtaagggtgaacattccagagggaatatggtgtgaaaaaaatgcagagcaggaatggacaagaaacgttcagggaatggagacaaggcgatgttcattgtagattaaatctctcctttattatcaatataaaagtgaaaaatcgaagagaatgacaatattctgagcttttattccatagtaataacaaaagcctcatacaacttgcatctgaattaacttagaatgaggagctttagcgttgactgaggagaaaactaagtacttaagagctcaggaaggatacaaagtaaaattagcatcaattttctgggctcctttgcagaaggcttcccggagaaagggattttagaagaaagtgataaaggtgaatttctggaaaggatgatagcaaaaaagaatgccttgttttggagacttggggaaagctgactctgtgaatggtataaccaaaagtgaggtctgaactgtagtctttaaagactacaaggaatgttgattcagcctcactctattcatcttggtttcatcttcccctaggcaccatagccacttgaaatcctgcaggcaaaaatttcctacttattgcctcttctattctttgaagtttcctcctgtctagaaaaatggagcttatgtttagtttgagattttccacgttttcattcatgcacccagctctaatgtttcttattgtctccccaaaggaactctgtttcaaatgaaactgctgatcatttcccagcatgttgctttttctgtctttgctttctgcttttctcctcaatggagtatctttcactgtcctctcagccatatgagtttaatctacttttaaaatccaaggcttcagaaatcacttctctgaacctccctggctactttttggtttcattgaacatgtatttccttgtggtgttgtatttgcttatcttttactgcctttttcttgttatattggaaacattgtcaaggggctgtgacttgtaaccagtactacattgcttggtgtttctgaaaatgtgtttggtgatgatattgtagactagtactccatatatttatgacttagtcttatgtagactgatggttttcaattttatgtatttgttcatttttaatggaaaaccagagcttgttaaatgtgtggaaaccactagaacgtaaacttcatgagatgacttttgttttttttttttgtttttttttgtttttttttgtttttttttttggtgtagtaccatatcttcagcacttagttctagcccatatgtggcacttaatacattatttgttgaataagtgctgatttaatttacttaatctgtaggtcttcattggttcttttaaatatgtagtaagaaacctccaggatgttatctcaattaacaagatcattaggtgccatcccagtgtttgaaggataacatcacagcatctcatcattttttcctaggagaagaaaactttattttattttgctctgatttgtttctttttttgagacaagacagaagaaaaaaggtaagaaatcatagttggtgtaatctcactttagtttattcaacatttttggtcttttcattattgaaaaaaaattgcagtggaacagaagaaaaaatttgatggaaagactgctttctaatttatggaccttgaggtttggctttttaggtgtttatttaaggcttgcccactctgttctctacattgacatttcatggtgaatattttgcttattctaccctctgtattttttctatggcagcttgcctggcagtattcagaaactgagaagaatattaaagatcagaaccttaaattgttcactcttttttttttttttgtgagacggagtcttaacgctgtcgcccagtctggagtgcactggtgcaatctcagctcgctgcaacctccgcctcccaggttcaagcgattctcctgcctcagcctcctgagtagctgggattacaggcacatgccaccatgcccagctaatttttgcatttttagtagagacggggtttccacctcgttggtcaggctggtctcaaactcctaacctcgtgatcctcctacctctgcctccgaaagtgctgggattacaggcgtgagccaccgtgcctggctgttcactcttgacaaggatcaaaaacaggaactaagaagcagaccactaactttttccttttttctcttttcttttgcctttagctcaagccaggacagaacagctgcagggacagtgacagtgaaagtgccagtggagaatccaagggcttccaccggagcagctctcgggaaaggctcagtgatgtaagtttaagtaaaaaaaaaaaaaaaaaaaaaattaacgaaaaccactaggccacacacacaccattggttcaagtctgaattacataactttccctcatctttagaactttttgtctacccaagcattgcggttcacattatctttgtatacttatttgagcattgtagttatggtgtcattctaaaatgtcgtttgagcaaaaatgtattttgacaaatcattaggtaggaggaactatttgttaccttagaaacaacaaggccgggcacggtggctcacgcctgtaatcccagcactttgggaggctaaagcaggtggatcacctgaggttggaagtttgagaccagcctgaccagcatggagaaaccctatctctactaaaaatacaaaattagctgggcgtggcagtgcatgcctgtaatcccagctactcgggaagctgagacagaagaatctctgaacccagaaggcagaggttgtggtgagccgatattgtgccactgtactcagcctgggtgacagagcaagaccccatctcaaaataaataaataaattcccgttggatttctggaaggaaaaccttgtgagaatgcgtcatacctcttgagatatctgtttgccctctagatgtgattttcattgttctctagtctgcccaccaacagggcaggttccccctctattacttctgagaaccacctacccctctttggactctcttaccttctttactcatatgtcatatatcagcattttttttttttttttttgagatggagtctcactctgtcgccaggctggaatgcagtggcacgatctcggctcactgcaacctctgcctcccaggttcaagctattctcctgcctcatccttctgagtaggtgggactacgggtgcacgccaccatgcccagctaatttttgtgtttttagtagagacagggtttcaccgtgttggccaggattgtcttgatctctttacctcgtgatctgccttcttcggccttccaaagtgctgggattgtaggtgtgagccaccacgcccagccatatatcagcattcttaactcatctgtacctcaagagcaacacttggaaattcttttgtgaaatggatcaagtaaagagattttttttttttttttgagactgagtcttgctctgtcaccagactggagtgcagtggcctgatctcagctcactgcaaccttcgcctcccgagttcaagcgattctcctgcctcagcctcctgagtagcctggattacaggcgcgtgccaccccgcccagctaatttttgtattttcaatagagatggggtttcaccatattggccaggctggtcttgaactcctgacttcgtgatctgccacctcaacctcccaaagtgctgggattagagctgtgagccacctcgcctggcttaatttttgtatttttagtagagatggggtttctccatgttgaccaggatggtctagcattaacagaataagtgagagagtagcaccatgaaaaaaaagagatagcacttcagagtgtctgagtattaagaataaataaaggatatgtaataagaagcaaaatcttttattttctccattttatttttaaaaaacaccatactctaaagcagtgtgctgttcattatagagtgcaagatgattcattgagttccagaaagaaaatactagtactttttttcttaaaaaaagaaattaaactttactagtattcagtttaacgagcggggaataattgatgtctataatttttaaatacgtggatttaaggagtgtatactcaaaacttttttttactgagagatgtctactaacataaacggttggagaccactctagcacactgagcagttctctatgataataccacatccatctctccatcagccaaggtagacaattccgagatacaatcacatttctgcacctctcatgaaagtttgtgaggtttatgatgagatgttgtatgagatactgtattcttacaggaattaaatggaataaagtataattatttttatgttattttaatatattagttatagataataacctccccttcttctgtgatataatatcaaagttatataaataaagagtactaacagtattttactgtgtgtgtgtttctgtgtgtaagaatatgttttattgtgtgtccatgtgtctgattaattttgtgatggagctatacaaccataaaaccatgacaacttttcttatctaagttgttagcaataataattaatgtttaaatagctgtttttctgagatttttgttatacttttaatgtaagatctcattgactctagaaattattccagggttagtaggtcatatttttttcatagtgtagagaaatgaacgccatgttagtttaggggactagagctgccattggatcttttggcttgtttcctctaactcactttctgttagataaaaagaaattgacaaaagacattccatattcatgaatagaaagacagtattattaagatgtcagtactaccctaagctatttatagattcagtgcaatgtctatcataattccaacaatctttttttgcaaaaatggaaaagcagattctcaaatacatatgaaatggcataaggccttaataaccaacacagtctggaaaaagagcaaagttagaggactcacacttaccaacctcaaaactcactgcaaagctacagttaatcaaaacagtatggtgctggcctaatattagacatacagaccaatggagtagaatggagagcccagaagggagcccatacttatatgcctaaatgagttttaacaagagtgccaagacacttcaatggggaaagaattttctctttaacagatggtgttgagagaactggatttctatgtgcaaaagaatgaaattggactcctacatcgcactatgtacaaaaataaactcaaaatgaatcaatgaccaaaatataaatgtgaacaccataaaactcttagaagaaaatatacaggtaaatcttcatgaccttcaatttggcagtggcttattagatatgacaccaaaagcatgtacaatgaaagagaaaataaattggacttcatcaaaattaaaaacttctcacaccaaagagcattatcaagaaagtaaaaagacagcctacaaaatggggaaaagatttgcaaatcatataagtggtgtttactctacagaatgtgtaaagaactacaactcaataataaaaagataacctaaagcaaaaatgggcaaagaatttgagaaatatttctacaaagaagtacaaagaagaggtacttgaaaaatgctgaaaatcattaggtattagagaaatgcaaattaaaactgtaacgagattatcattttatacctagtaggatggttatgcttttaaaaagagaatgaaaaataagaagtgttggcaaggatgtggaaaagttggaatattcatacattactggtgggaatgtaaaatgacgcagccactgtagaaaacagcttggcagtcctcaaaaagctgaaacatataattaccatatgacccagcaatttcacttttaggtatataccccaaagaatggaaaacatgaacttaaacagagacttgtaagccagtgttcactgcagcattatttatggtagtcaaaaagtagaaacaacccatgtgtttctcaacaaatgaattgataaacaaaatgtgacagcttggctgataggcacacaatggaatatactcagccataaaaaagattggcattgtaatatatactacaatatggatgaactttaaaaatatgctaaataaaagcaagacaaagaaggacaaatattgtatgattccacttataagaggtatctagaataggcaaattcatagagacataaagtagaatagaacttaccaggaatttgggggatggagagtgggagggaggaaagctattgcttgttggttacagagtttctttttggggatgataacaatgttttggaaatagatagtcatgacagttgctcaatgttttgaatgtaattaatgccactgaattacacaattaaaaaatgatctgttaaaaaatgtaaaaataattagggctgtaataatgcttattctgctttcacttcattgaaaatatggaaaatagttataacttttaccagccttgtctactaattgtgtcacctgtgccatttctggtcctgtttctattggttgttttttctcttcattatgggtcatattttcctgcttctttgtatgcctggcagtttttcattggatgccagacattataaaatcctgtcagtcttatgtcaagccagtcaatgaaacacttccgattcatattgtttattatattttaaaattatgaaaaaaatttgtgggcatatagtaggcgtattgttcattaattattaaaattcacactttttgcaacattactgaaaaggaaagaaagaaaaatgacccaaaacgtggacatttactgaaatgttttgagatccctagtcacatttccctcactcatgtgcaggtctgaggttgcagagtcctgtgtcaagcactatggcaatctgaaatctgctgagatgaaagctttttttttttttttttttttttccgtgacacggagtttcgctcttgttgctcagcctggagtgcagcagcacaatcttggctcactgcagcctccacctcctgggttcaagcgattctcctgcctcagcctcctgagtagctgggattacaggcgcttgccaccacgcccagctaatttttcatatttttagtagagatgggcttcaccatgttggccaggctggtctcaaactcctgacctcaggtgatccatccaccttggccttccaaagcgctgggattacaggcgtgagccaccatgttcggccgagatgaaagcttttaacaaaccaacccacagaatggatcttttggataccaaagcaacacctacctgcacaatattttagagaataaagatgccccattttttcttgaaagagaattaacaattaatttatttttttacttttattttagttttgggggtacatgtgaaggtttgtaatataggtaaactcatgtcacagaggtttgttgtgacatgagtttcatcacccagtagtacccaatagttattatttcatcacccagaattatttcatcacccagtagtacccaatagttatcttttctactcctctccctcttaccacctttcaccctcaagcagaccctagtgtctgttgtttccctctctgtgttcataagttcttattatttagctcccacttataagtaaaaacatgcagtatttggttttctgttcctacattagtttgctgaagatagtagcctccagcactatctatgttcctgcaaaagacatgatcttgttgatttttatggcaatgtagtatttcgtggtttacatataccaaattttctttatccaatctgtcattgatgggcatttaggtgtagcccgtgtatttgctattgtgagtagtgctgcagtgaacatttgcatgcatgtgttgttatggtagaatgatttatattcttctgggtttatatccagtaatgggattgctgggtcaaatggtagttatgcttttagcttttgaggaatcatcatattgctttccagaatagttgaactaatgtacactcccaccgatagtttataattgttcccttttctctgccaccttgccagcatctgttgttttttgacattttaatattaataatagccatttgactggtgagatgatatctcattgtggtttttgatttgcatttctctgatgatcagtgatattgagctttttttgtataggcttgttggctgcatatatgtcttcttttgaaaagtatctcttcatgttctttgcccactttttaatggagttgtttggttttgtcttgtaaatttgtttagctccttatagatgctcgatattagacctttgtcagatgcatagtttgcaaatatttttctcccattctgtaggttgcctgtttactctgttgatagtttcttttgctgtgcagaagtgcttaagtttaattagatcccagttgtccattgttccctttgttgtgattgcttttgatgactttgtcatgaaatctttgccctttcctatgtgcagcatagtactgcctaggttgtcttccagggtttttatagttctgggttttacacttgtctttaatccatcttgagttggtttttgtatatggtgtaaggaaggggtccagcttcaatctttttttttttttcttttctgagatggtgtctcgctccgtcaccaggttggaatgcagtggcatgatcttggctcactgcaacctccgactccctggttcaagtgattcttctgcctcagtcccccgagtagctgggattacaggcatgtgccaccatgcccagctaattttcgtatttttagtagagacgatgttttaccatgttggccaggatggtctcaaactcctgacctcgtgatccgcccgccttggcctcccaaagtgctaggattgcaggcgtgagccaccgcgcccagcccagcttcagtcttctttaatgcctatcagagagtgaaaaggtagagtcaaagatgactactggtttttgtttttgttttttctttaaaaattccatattagttcttattatgcttattcttctttcacttcattgaacatatggaaaatagttattacagcttttactgtccttgtgtactaattttgtcacctgtgccatttctggacctgtttctattggttgttttttctcctcactatgggtcatattttcctgcttctttgtatgcctggcaattttttattgaatgccagacattataaaattttccttgttgggtactgggtatttctggtttctataaacattactcattttgggatacaattttgttatttggagatgtgtgtgtgtgtgtgtgtgtgtgtgtgtgtgtgtgtgtgtttttaatgtttgcttttgtactttcttggacaagaccagaacaacctttagtctaaagataatttttcccccattctgactgagtactttgcctaatgcctaacgtcttacaaggtttttccactgtagattgtgggaaaacaaactattccctgccttgtgtgggctttgtaagttcttcctcctccttcccagtggtggttttcctcgccttgggtattttctctcacagatgtgctgactagtcatcaggtagaaactagaggggaaccttctgcagctttcatgattctcgctttctgtgatgctgtctcctccttatcctctgccttggagttccagctgtctttgcctccccttattctcaactgtgtcttcaagactcagggattccacctgggtcacctcctacccggcaatcatgtggcatgaaaactctccaggcagtaaggtgggaaaattttaagggtcaccctacttttttctcttctctcaaatattattgtcctttactctgtcttacccaatttctaaaaactcctgtttcataccttttgtccagttttttagttgcttgaggtgggagaatacattcagtccctattagtccatcatgcccctgactcgtttttcagctaagatgaaaatttctgtcagcctttcacccattttagtgatatttttaggagctttggcagttgagacttactctcaagtgaggctaatcaaaatagtatattattctagctttgtttttttgaattggttaggccaaaagaataagaataaagaattccagtgtagctgtataatttgactcatgcgtaaagcttaaaaacaccaaatatgtggccaggcatggtggctcacgcctgcaatcccagcacttttggaggccgaggcaggcagatcacttgaggtcaggagttggagatcagcctggccaacatggtgaaaccccgtctctactaaaactacaaataaattagctggacgtggtggagcacaggtactcgggaggctgaggcaggagaatagcttgaacttgggaggcagaggttgcagtgagccgagattgtgccactgcactccagcctgggtgacagagtgagactctgtcttaaaaaaaagaagaaaaacccaaatatgctttgcttttctaaattatatattcccagaccatgttgcctggggggaataattggccacaaggactttcagattgtccacatcaaggagacatagtaacttgtttagattagtcactagggaagagttaaggggaataattgaatatatagttaataaatgtttatgatgagttattcacagggaaaatattgcttccaacttaaacagaattttgtaactgaggaaatttgtcaaaagttaggagcaaaacttacttaaaaacttttaataaacaagcctcaaattatgaaatgttaatgggcatttattataaacaggccaagatttaatagaagttctgctatttattgtgtgtgaccttaggcaaagaatgtgacctttcttccccgccaagatggagtcttgctgtgtcgcccaggctggagtggaatggagtggagtgcaatggtgcgatctcggctcactgcaacctccacctcctgggttcaagcaattctcctgcctcagcctcccaagtagctgagattacaggcatacaccaccacgcctggctaatttttgaatttttagtagagatggggttttaccatgttggccaggctgctctcgaactcctgacctcaggcaatccaccctcctcggacttccaaagtgctggattacaggcataagacactgcgcctggccttgttcgcactttcaaatcttcctacctttgcttattctttttatttatttaaaatgaattgcagtggcatgatcacagctcactgcaaccttgacctcctgggttcaaacttttcttgtgccccggcctcctgagtagctgggattatacacaagtgctaccatgcttggctaatttttgtatttttagtagaaatggggtttcgccatgttggccaggctggtctcgagctcctggcctcaggtaatccaccctcctcagccccctcccaaagccctgggattatacacatgagcctccacgcttggcctattttatttctgttcttttttctttctttgtttttcttttccttatgtcagcttcaacctcacttctaccaaacacttcccaacacactgtggaagtaaacttctttaatgctttatttaatgactatatgaatatgactcttttcacctttctctctgaaagaattttgggttgggttgttagttatgagaagacagaaaaatatttaacacctttcaagggttcagatcgttcaaggaattgaaacatctcagaaaataatgaaaatggatcaaagtcttatgagtctaatgctacacagttgtctactcttattattctggtagctatttacagttgagacattttttctgcttccttttgagataccccttctcctacttcaaatcttccctggtctttgggtttttattgatttgtctatcccacagtgccactgttcatccacccatgccagcatctgtcctattctttctttcttcctcccttccttctctccctccctccctccctctcttgaaatctttattgaggttttattccatgccaggttgtttgaccagctactgttaaggaggaaacagacttgagccactaccatgaatgagcttcccacattgttataattagattaggaaatctaatctcgacctgacaaggattcttggtgttttattcctctctttttaaaaaaatctgtgccacattttccttttccttaacagtttgcttatgcctttttccattcctgtcccatacatttatgaattctcctggatatgtcagtatttcagttgccaagaaatgtcaatcaaatttcttttattcatcaggtatagtctgggcatttgaggttgagtggagaacaagatgaaacctctgccctcatgaagtttccattctagtgggagagacaaatctattaagaaatagctacaattttttctaatagaatgttttctgacataaacaatatgaagggcgggagtttgttgctactttaactagtgtgattagataaggcctttctgtgtaggtgacattaaaactgaggcctaagtaaagaaaagaaggtagacaggtgaaggtctatgggaagaacattctgggcaacaggaacaacaagcttagaggccctatcagaagcatgttgtgttcgagggaaagaaaaatggcttgtgtggctacagtagagtgaagtagcacagtggctgaacacgtaacttctagcccatgctaaggaggctgggtgttgtattaatttcctgggctgctttaatgaatgaccacaaactgtatggctggaaacaacagaaatctattatctcacagttctggaggctagaaatttaacatcagtgtgtcttcagggctatgtaccctctgcaggctctagggaagaatcctttttttctcctggcctctggtgcctcccagtgatccttggtgttcctggcttatagatgcatcattccagtctcttctttagttttcacatggtttctacagcagccattggatttacagcccatcctaaatctgtatgaccttaattaggtacatctaaaaagaccgtatatccaaattatgtcattgtattagacttctccacagaaacagaaccacagcagaagataacagaaccagcagaacatgatttattatgagaaattggctcagttttggaggctgacaagtcccaagatctacaatcagcaagctagagacccaagagaacctatagtataactctagtctcaaggctggcaggtttgaaactcttgaagagctgatgtttttattgtgtctgaaagcacaataaagaactgatgtcccaggtcaaagccaggcaaaaggaattctctcttctctgggagagagtcagccttttgttcttttcagaccttcaactgattggataagtctcacccattttagggaggacaatccagtttactcagcatatcaatataaatgttcaactcatctaaaaacatcatcacagaaacacccagaatcatgtttgaccaaatatctgggcaccccgtggcccagtgaagttgcaacataaaattgaccaccacaatcacactctggggttcctggtagacataaacagggggacattgctcaatccatgacaggttattatcttaaaagccactggactatgttaaaaggattggagttgtagttcttactttaaaatgtttattttgcctttgatatgaggaactgtccatgaagacaagagcaagaatgaaatcagaggtagaagccagaaggctgagatgagagttggtgacaacctgacgtgggcataacagaaggttgaataattggtgttggaagtgacgtagcatttttcccacctgatgcttttatcaagttgttgctccatttttacttgatttcttccaacaactatatgcttatttctcaatcaaatatatatatatatattgtgtgtgtgtgtgtgtgtgtgtgtgtgtttggtcggctattagtaatcttatctccaaggtacgtttctttggattaagatttcaggtttttaaaacactactggaagatctgtgaatgagcttgttttgtgacctttgcaagaaatttacttgttcatgtgattcctggcatggtccttctcctttttactcccaagagagaaaagcataacatgaaggtgggtagccaggaatgttgaacacaattagcgatttggaagaatttaaaaatattcaatttaaattagccctagggtcagaacacacattctcacctaggggtggagtacacatgtgtcctgtctgtactcagggagctgtaacagtagccatggcctctctgtgtggatttataatgaatggagcacatctattttagatggataatcaattttgaaatcccttattgtaagtatgctgttaaaacagaaatgttaacttcatgagtttaatgagtagcttcgatgatagcttagtgaagagatggaaggaaaggcaagtggggggaaatgagaaaaggagaacaagtgtttaatgaatatctacttgcagacttgaatgtcagcagcaacattctccctcctggaaaatgtctttcaactgtgcatcccattatgttcctgcagcccgtggtagcatgaagattgagacaaagagagtgtttctaagaaagctctcctttacaatataatgagatggaggtgggtagtttgcagagattgctggagcagtggtcaaatatgaaaaaaaaaaatccagcagaatgaaaagaccatgttaaccaggagatggcttataatgagcccagaaattgcatatcagatagccagctggctagcatttcctcatatccctgtgttctcatgcaaactgctaaaatgttctcctactctattttctcagcctcttaatagttctcatttctacctactgcattgaaaatatgaatgaaatggcaactctaccacttgaagaaataagaatgaagcccttttcagcaaaagtatttgcctaaacatggatggatattatttcaaatgcttttgaaaccaaggaaacttctgtttctttccttaaaaaaacatcttaactttcaagtctcagtttgactcacagccttttcagtattctgtggcctcttttgctatatagtttggacagactttgcttgaagtctccaagcaaaaaaatggaagtcctcccttcttattggaaattgataggggaggcttggcacggcgcctcatgcctgtaatcccaacacttgggaagccgacacaagaggatcacttgaagccaggagtttgagaccagcctgggcaacatagtgagatgctatctctaggaaaaaaaaaatagctgggcacagtatcgcatgcctgtagtccagctactcaggaggctgaggcaggaggatcacttgagcccaggagcttgaggttgcagtgagtcatgatcttgatcattaaggaagagtcttgtgaaattgttcaatagttagggtattatcacctgtctactttcatggttctttaccttttggtgactgtctcttctttggtgactgtgtcttctaaaatgagaaagcagtaccaatccctaaatatacatctgtcaataacttacagcacatttgaaacaatattactgctgtttctaaacattccttttttttgtttttagcatgatctgttgttgcctgtgttcatataatttctgtcttggaaaattattgaagctaccaaatatttgcagctgtatttagatatagactttagattataaatatatgacagagactctttactgggccttttggatgcgagacctcagggatatatgatacgtgttgtgagcctcagctaaagtctgacttccctgtggctggtaacttctgttaccaatactttaatggtggggtcctgttggtgaccaggcgtaatatctcactgaatacaaggccgtagtcagaatcttggggttgtaggactagacaagcagaagtctctttatttaatagatgtcactcctgttaaaattctccagctatgactgaagggagttggcaagtagccaagaaaaatgtggtgaaaagggtttaagaggggaggaaatgtcaatgccatggacatttggcaaagtcgatcacaagagggtttttctacacatgtgttttctgctgatcctgaaatcaaaactgaataccatgcatcttttcccttaaaaaaaaaaaaaaaaaaaaaaaagagtacagtaggttggcacatgtgaatggctcctgatacgagactctgtatgctttctagcaaatgctgaaacaaattccagtggacctttaatgtatatggggatcttgtgtctgtgttccctcgtgtgtctgtgtttgtgtgtgcccgtgtctaggggaggggagttataaggcagggtgcttaaatgctttgttacattatgttaattcctcggcagtgcaatcaaattcatgtcgtaattaaagctgtcagttggaaggcaagccaatcgccatgaaaacacagcataacaaatgaagtgaaatgattctgcgtgtagctatacaatgcttcgccaggcatgaaattaaataagtaatttgatgttgacatcagaaattgaaatgatacccactgttccctcattcagtcagacctgcataaacaatagccagaacaaatatgcacaacaaagccctcttctccacccagctccctgagtaatgtacaatatatatgcaaaacgagcataacagagctttccgagacctgaaggatgtaattttctttggtatacgataagatgatatgtatgtgggggtagggaagtgggtttggtgggagtacttctctttctgggataaaatacatttgcaggaagggaaagaaatgaaataaacaaatcccatggtctctctgagtaattcatcctaaaatgagttcacttcccaggggcatgactccaagctggtggagacctaacttggcttttgctttcttctgctgctgcatggagggctgtgggtgctggaaacaggtgatgctgtcatatggctagtcactggtatgagaagttgtctccatgactactgtggatctccctccataccatttatgggattaagaatgcagcaggattttaaaaaactgagtgcagtgagcaggatcacacatctatggtgcttcattcccctgagcttgtgtgaaacgctgagatgaggaaagttttgctttgggagctgcatttaggaatgccttgaagcatactgttcttgtttgatgtagatatagttacagtaccatgtttcctcctcaaagagcttagcatcaagaagagtcaccatctgctgtatttttatagatgtcaaattctcctgagccatttttcttacacataatccatccattcatttatttatacattcattcaataagtccttattaaatgcatcctgtgtgcaagtcattgtgtgaagctctaagaagcaatgatgaaaaagccagctggttactgctgtctgaagtttccagagtagggggcaggacatgtaggcagaagagctagcagtgaacagagtaactgttgcatcagggcagaggtcattttgcttctgggaaagtataatacccaacccaagctcatcagggaagaagcctggctggtgcagggatgcttagctgagacctgcagacctattcagcatttgcttcaccttcatttcaagcttaatcacaaagaggaagaggatgctaaaaattaaataatttataaagagaggttttaggagaaaaaaagaaacaaaaatcagaatctcaggcaagtttaaaatacattttttgggggggcttcttttcccaaacaagtgatgccctgcattcctttcagaattaacatttttaaattccctgtgtgtcagaactatgacagcctaaactggtaattcttgtgacttaaacccttcagaaaaatggtgcttttcactgctcctcttggcccacacattctctgcattttagtctactaattacgtttacaaaatgtctcatttttgaaaagccctgtgtgtgtactaactgatgcctttagggaataaactggcaagtaggtcatacactggaaaagtcatccaaacccactgggctttttattttcaagtcaatctgggctttttcctcttgcctgcccctttgcggccacaaaactgagtagcttgagaccagggcattgaatgtcagcaagtcagggaggcaagctgatgcgtgtctgtttagtctcagtgcagggcgaaatgccatcattaattcattacccagctgcctgtcaaataaattggcaattacatccaccgcagaagcttggaattcagtaaatagcacgttagcatctctgagttgttgagagatgtaaaggggaaaattaagcaacacggtgtttgtatcagtagcagatgacaaggggcagcatacactggtgatgtgatgtggtgatgaaaagcctgcaaagggctggtaatgagctgtgtggattggaacgtgttaaaaaccattgctgattttccacttttgtctttatgctttattgcagagttcagctccttccagcttgggaacaggctacttcgtaagtctatctcaacttccacatatgtgccttgcattggcattgatttccttctataatgaatgctcattgggatatgaaaaaaaatctgagaatttctctctcagtcctaaagagcagactgatttccattctttattaggaattgttttatttttagaagacatagcctgctgggccctagggatcttaagtaagtccgaggtatatacctggttcctaacgcccaggacattaagctccttacctggccatgtaaggagatacagggaaccctgattagctcatgccaccatttctccacaattacttttttagtaagaagtgtcatgtgggggatggaattcagattatgcattgagataactgatttcttgaataacatctcttcatatacaatgagttgccttttttggtggggaggacggggaatggagatggtattttttaatgaatgttttccctcacagtctgggtagtttgcctttaggtttttctttcagcaataattaatatacttatttttgctaaaatgcaaagtttatttctgaaccttattctctgtcctttgggaaagatggcagtgaggtgacccttcagggattatcacaatattgtgataatcatgaatataaaattcattctcaaacagcagttgtcacttcattatatttatttatagtgaaattctcctttctggatttagtgacccttttcaagatacaaatgaaaaagagtgacaaataagcattatttgtacaataggataacatgtcaatgtaaaagtctgttgtgatgcttaaaggaatctgattggtgttctgagtgatgaacactgatacagtcatgcctcagtattttctgagaaaatagtgaaatcatgaaaatcaaataaagtggaaaataattactaattcactttagttgcttttaacttttctctccaatgctaattactctggttttcttctgcccacgtatttctctcgatacatttacattaaatttatggaaaccagcatcatttcattaataaatgagtattttccaagcttagcaaaagtggcattttctagatgttgacttttttttggtcttaatctgtaataggagaaaaagtataaggatgatttggacctgcttaatacagttagcacacttacccttgctcctacttattgtggctgaatattcatgctaacagaaacaagcaggatacattcagtatcctgcttcagcagtcgaaataacagacgtagccccatctggcatctcttcacaccaggctggatgtaggttgagatgctggaagtaaaatctggagactgcgatatctattctccatccaaaagctaaagcctccccctttgctttcttcagcagaaagaaggccaaagccactaccttagtccttgatcacttctgtactgaacattctagtattttttttttattgtcagtaggatcaccctgaaagaagaaagtcatttctagaaacattgagattttcattatgctttttgcagttatttttctctctagttccaagaatggttatttttattctctaataatatattcttatgatttaaagagtctttaattacatgtctattaataaaatggcttttacagaacattggatgagtataaaagttttctcttattttggtaaaattgctggtagacttactttgcttacataaaagtctgtcgtattattagcttacatggagaagatacataccagatgtgtattcagctttcaactgtgacaaaaatgccctgctaggatgtgtttccaataatgtgattgttatgttatcagagtgcaaaatccattgatattgttgcccagtcctcatgaaaagtatcttctatttcaactttctttccaatagtatcacatgtaataatttcagatactaacttccacactggtgagtttcatacttctaagtggaaatgatatgggcacaacttacattagttctttgccaacatattatttacactgtgctttgtgatttgtgctgtcataatagctttttacttaagcctgtaaagaaggctcagcttcaggtaagtgaaatggtaatttttcaagtctatccttactcctcttcagcatgtctttgaaatgtggatggagggaaatcacctgcagagtccatgagctattagcgcaattgaaccataacatgaattctggtgtaagaaagctgaaggcacttttaacaatctagaaccgttttcttgaacactgtcccaagccccaacttcacagacttcctttgtttctatttagagcttttgtcaacagaggtaagatgctgttcattgtgtttgttaataaaatagacacctgagtatatacatgtgcaggtgtgtgtgcatgcacacacacgcatacacacccttagccaaaaccagtatattttactttcagttcttttatctgtagtgatacattcaagggtttaaaggagaagcctttgtttttgatctggttgtatttgtttatatctccttggttttgtgttccaaagatgtctgcttaggtctgtcacttttccaatccgtttagaagcagaagatttgagaaatgagaacagcagctcaaatcagtatttacataagcatattgcaaagaattcttaaagtagacaaaatagagaaggattggaacaaactttctacatttttgggagcttttgaataatgtgggtgttatacacacagagagacacacatatatattcattacatactcatgcccagctcatattctaaatataaatgaaagtatagactagttggaatcgatttgctttttttttttcttttttggcaagaggactaaaacttgttagagtgtgtgtaggattttcttttttttttttgttttgaacgtcaatgcaatgaacacattttcttttcaatttaaacgttttaggctgtattttctccttaaacatgtatttgaggtttcaatttgcatagtgtataattaagaacttagaggcagaatgatcttttaagactacctgtatgaccttggtccggttattttatgtctctgagtctatttccttatcaatacctacctattagtgttgcaaatattaaatgagataagatattttaatgaacacagaatatcactctatactaccaaataataagtactgccttctgttattcacacaatcgtgtgtgatggagcaaagttggtctcatcaggtggctgtgcaatgttgtgcaaagtaggttttataatttgtacctgtaggatagtagtattttattcttattatattcttcttgtagctttctcaggagcacagcttttgtatttgatcagttatttacattttttctgtatgtgaacataaaacagggtattcatcctctgtgattctatatgaacatgacgatgttggaatgaactgttctattagctgtccacatattatggttgttctctgtaatttgtcagttaaagttacttgtgtattttcttcctcagaagcatttgaagtacttggagcttttaaagactgcttagcagcttttaggattgggctgagagggaaggtacacctgttcaatatattccacttttatgaacttgtatcacatttgctcctttctgacaagaaaaagaaaaattgatgccctagcatatatgaacacagtaactgaaatcagtagaatgaaaagaccagtgagaacatttcgtgttggccagtggtctggtatgtcatcacaggaaagatctggactcattctttatagcacttgactccatgtggagttgggagctacttttggggcaactaaccagccaggcagaacttgattcctgctgtaagggaagtacagccttacttttttccaagtgacatgttctgccttctctggataattttcagccctcttccaggtttgaatctaactgtcttagaaccacagcctcaaatagcttgtatcctgcttttgtaaactccataatttctcttaaggattctcaactaataattttcatcttcctcaattgggtcacatctagtaattgacatactttaaagttatcagggaaaacaactcacttctactcagtgattaaaactgccgcattatatagtaaaggggaattgtgtagtggtatacatcttcagacgggatttgtataattattgttttcctgtgcagttgaattacttaagttgtgtaggtagtgctggtaacaggcagtaggtgcaaaatattgacctgtagctttccatccagggttataaaggtcatagtgggaatattctttgcccctttctaagtttttgactataaacccttgaaatatctcctgttttcctttgctataattttgtataacttcttcttttttctttttgacagggtctcactgtgtcacccaggccatagtgcagtggtgtagtcacagctcactgcagcctcagcctttctgggctcgggtgatcctcccacctcagccttcccagtatctgggagtaaatgtgcatgccaccacacctgcctaatttttgtattttttgtagagatggggctctaccgtgttgccaaggctggtcttgaactcctgggctcaagctatctacccaccttggcctcccaaagtgctaagattacaggcgtgagccaccatgcctggctgtataacttctaaaactgatttggtattctgtctaaccatagttgctttttaaccattttcccatttccccagataatactcaccagtggtgcttgcggctgcaacatttatcttgatgtaactgccagaaaatatcttgcttttattattttcccattgctctagtatattgactttggaaacaaaagacgtcattctactcatagcattctattttcagtagtggtatttccatttataaaatatagtaatttttataaatgccaccatgcccagccacttttaaatatttctgacacattgtattcatttattttctgggggtgaattcttttattagaacattcaaattaataattttgtttggtttgcaagaaaactgatgccatcaaggaagatgaaaagttactacacaaatttcaacaaagatttctataatttataaatgagggctgggcacggtggctcatgcctataatccagcattttgggagactgaggcgggtggatcacttgaggtcaggagttcgagaccagcctggccaacatggtgaaaccccgtctctctaccaaaaatgccaaaattaactgggcgtggtggcatgcacctgtaatcccagctgctcgggaggctgaggcaggagaatcacttgaacctgggaggcagaggttgcagtgagacaggatggcgccattgcactccagcctgggtgacaagagcgagatctcaaaaaaaatttataaatgaggttgaaaattcattttttaatttaataatcccagtctcagatgccctttcattctttgaatttgcatatctctataatatttctctttcaaaattttctggttgtcttatatataataccttgtataagctgatctagcagtggctagataggatcagattcaggtttggattttggcaaggatgcctcatagatcatgttgtgtgcttcaattaggagccacatatttagttctttatttttattaatgttaacagccattgattagacccagtgttcgttaggagctgcaaaatggtgatattgcagttccatcattctgtaaagagaaacatctacattaactacaggtatttggttatcctgaggtacagttaacacactgtatttgaataagagggtttgagctctccagagaacctatcactatttataagatttcttaggggttttagtttcagaagtacagatacatcaacttggtgctgacggcagctccatccaaagcagaagaaactgtcttcttccccacttggcagtacttgctgtgatgctaggaaaggattttgtaattcaagtgttcattcatcacctgttaagtacttatatttaagataaataacattaagtattttaacacttccccccaaataaagaccctaatctttgtatttattagtaattaacactaggtaaattaatttttggccattatatattgacaaaaatctattataatggaaatatttttgaaaatctaaattttatctagaaatccatgaaggatatccagttattattagggcatttggactaattgataaggagttgagttggaaaactactctccagatggagatttcaattcattttaactcacaagtatgacttaaatatctactcttagttcttaagttgcataacgtgtaagcatggctctcaagtcaaagatatgtagctgaatttgaagcaaagcaaactgattggtctatgagaagtgtaagtagagcacttggaagtataaaggagggtcagttaaatgtagcaggcttaaattgtgcagagcttgatggatgtttagatagtcaacaggaaagaaagggtggaacaagtttgaggcagggggagcaacaaagacaagaatacagagaaattgcataatagtgtggattgaattgactgtatgatgtctctggagaaagacgggacttagattgtcagggaatgttggttgattacagggaatgtgggataaagccagggaggtagtcgggtgagtggggaagagatggtttgtagagaaggacgtcaagtaaaggatcaatgactacaatactcttacttggagttagtccccagaagaggagatttgaatgtaggaaaatggtgagtttggaagttagaatacgtagttagaaatttaagtgtgtatttaagtgtaacttaaaatctaggacattaccaatgcctttgaagctacctgtgtactgtgcagaaacatctgggcaaacgaaagttgttgctctcccttatggtgaaacattgtcacattttttaaatgtaaccttcaaaatactacccttaactgtgttttttcctcctagtaacaaaaccagaatctaaggtgcattctgacagactcctccacgtggcgcagataaactctctaatttcaagggccttagacagaaaatataattgtatttcccatgtctaattcttacccttttttggtcatgtttttgatctgttaacattttaattgagggaataggatcagtgagccaggagcagacacaccttgactaaatgaacagtacaagttaaactgtggtgagagacatttaaacatttgtagaatctctacaacaggatgacttttccagcacactctgtagaaattatcttctgcctacacactatgtttaacttcagcttcctcattcagtacaagggaactgagaaatttgacaaaaaataatcaggtgagaaaagatcaattggtgtttccagttgcaaccaataattttaaccctttcattttctcaacatttaaatgagggaataggctgggtatttttaaacatttgctgtctacaggaatctttgacattgctgttgcaaactctttaaggagataagcggaaaacttaggtgctactgatggatgtggggaaatagccctcagccgttatctctctgtcctcctaacccccatctctggcccctcagatttagagggaaaaaatgattttggagaacaaagatttaatgagccactaggcaagagagtggctaaaggaccttaatttctaatatttcaaaatttatgattccagctgccttacaactagatgtctgccatgtgcaaccattgcttgttgctggcctcactgcctttctttgctgtcctttgagccacaggaatgcaaggccatagtgctgcttagtgaacactgttcttcactgtcaacattgaaaggagtcctgatttcaacggagtggccgagtctgcttttgtttgaaagtaatgtattttaaaattcattatgaacaataatgcaattattcataatgaataatgttttatatttgcatcattcatttagggctagtacatagagatactgaagctgttggcttagcctgttccatagctagtagattgatcatagagatgaagcggtaaaggctttagcacagtgcattgacagtcccagagggaatggacaggtcattgccatggaattctgaaaataattttatcttcattttcatctttttttctgacattggctttaaggaaggttgtcttatccttgttggagatttccacattacagaaatttgttgcatttgttgatacaagctatgtaaaatgacccacaggcaatgtcaattccggaggtttactctgattacccacacaacccttattttgatagatttaactagcctggagttttattgactatcactcagaatctttcagatcagagaactcactcctttgcttaactacttaaaaaatatttttgctgaaattgtaaattagatgcctcccaatccattgcataagaaacttatagcttggtgaaacaccaagagtatcatttgaaaaagaggttaaaaaacacaactggggcttgttaaagaggaaaagtggtattttaactccaagtgtcacattttcctatagtcagctctagcagtaaacaagagttattggaggcttagatagtttgagacacttcacttatctcccagtacttgacttcagaagccaaacatttaaaatgtgttttgctcaggtaaaaatgtttatccatttaaaatacaatgtcattttaacaaaagcaccctggtgacaagctgtttagatatagcacagttgataaactgtcagatcctgtacacatacacttgaaaggaccagcgcagtaacacaaggattggcattataaatcactgttaacaaaccttaatttgcttagtaggctaatgaatgatctccaatttttcttcagtaattagcttcgctaacagccatgtcaaagggaccttccttatactgtatttaatctctgctctgaaatctttggtgtctagtttgcaggatgaataaaaacaaacaaaaaacatttcggtctccattggcgactccctggtaataaatccagatgtagggattgtggctgttttcaagtagaaacattgccaaaggtgatgactgtctattagggcttgtaaactgtaatataatcacagatttggaatggagtggtgaagccagataattgcagtgtttcctgtctaaatgtgctgctgtgcgtagtggcctctgattttaaggagctgttaaaaatgcagcaaggcataacagctgtggttcctagaatactcctaatatttcatatgttcatcacatctcataaaatcttgcccagaccaacaaatgactacttatctgtacagctggactgtcttagaaggaaattagagaaagtgtgaatcatgtaggttagcattacagagacccaccaagagctcatccaagcccgtgctgtgccatatttctcttactgctcctcagagttctccctttccatttttagtccccaaagagaacatttgcctcttaccatttgtgagcagatcttatcaataacttactttttcctacctttgtggaaaatagactcaactttgccaagagaacttagggttctggggcagagaaattcaggcgaagttaatatctcaacccaaaatcaaaaagagacaacaaatttagttctcttagaattttttaaaattaatttttaaaataactttgcaatagaactagctctgtgatatgaaaacctggtttttctgggaggaacattagtactaggacattctgggaagcaaaggaagctagtgaacccaaaatgttcttttaatcagatattaaacagctaagcatcatgaccaaatggaagccttaaactgcatttgtacagaggcataatagagtcacaagttgttttcgcctaattgtttctaaattgcccactttactaatttgataattacagtagacctattattttggttttacataggtccagagttacagaacctctaggtcagaagggacttcagaaatcaccttacccaatcaccaatctgagacatgactcaaaaagttatgtattattagagtaggctgacaatttggactgtgaccttgctcatcctggatcctgtccttcagttgttatagttgaaagtcacattaatttttctgccatgccacagtgttttcttgatgtcagtgactgttttcatatgtgatactgttacatcttttttatcaaaaagtctaatggattctgtcttaagaacgagcctttattgaaaaatctctgttgaagtttgtcatggtatacttagtatacttggcttattactttaacttatgtagattctgtcatgtcatatattgttgttgcttttagttccacactggtgaagatcatcaagtgctacaactgtctttgtggcagttaaatttcagtgctactagattttactcattgctcttcttgtaatgccccacgatttgatttacgctggctgagtattacaagtcctatgtatttctttccattggtgattcttatctggagctttaacagaaatcagacattgttcctctgttttggttatttatagatacatctggaaagagttttgagacaacctgtgggcatacttaacatactgtaccttttttctttgtagccatcgtgtacaactgctttaaaaaaattagctggacatggagaagtgtggaaaccattgttctgttacacaatggcaaaataattgaccattaaaatatacctgtgatagacttagttgtgatgtggatgcattcatggtaagcctctctgagttattctaatgtatgtgaacaagcagtattatgtaaaaatagaggaaaggatatgctataaaagaaatacagtttgatacagtatttatgttttaacagatatgcttgagtactttaaatagataaatgaaaaaactttctattatttgtagtaggtctatgttatacacagtagtgtcctgagaaattcttgagttgtgacatacatataaattttgaatacagaagggataagttcattttagaaattactgcaaattttgaattggtagagccatcaaatttgtaaagcttgggtcacatttacttctgtgcattgagtgtcattacattctgttttctttaattttcaaacaaagggttgtaccacgcttctctttgaagaggccttttggtttcagcacatctatgggtacgttgttaacactgtcatacctccagttaaggaatggtacacgtttagagactgctttttcaagtcaaggtgccaattatttcctgcctaagcactattttagtgaactcactttagtctaaaatcacttgttatttatctcagaatgttattaaacaaggataaaatcaatgcaaagccagcgatttatgtaaatcttataaaagtttgattttctttagatttttgtgactaacagcctctcagtcttccttggacaggggagtggttagagtttgggttccctaattctctcatcttacagcctaagctaagcctcaatggttgatactgaagttttgtgaccctcgttcaatgttcagaatctattattttagtacttttagtggggaaaaaaaattctgctttacttcttttcctgctgtgatgtgtacattgtgttatttttctactgggtgtgatttttgttatctttttcagcttcattgaccataattttacttattttaattaacatggatcttattaacagttttctctcctgtacgtttgtgtttgtgacatactcttcactacatacttgaattaagtaattttattatttttcatctttcagcagtatgcttattcttggttcatttactgttttgaagcaatggaattacttacatatttttatttttccttttctctcatcttctgttttccaacctctacctccatttggtcctataacatgataaaagtgcaaacatgagcctgaataataaaggattgcttcactgattgctaaacatatattatagtgctttaaaactcatttcaggtcatcgtggtggcaattagtttgattacaagcatttaagctgtcacatagaaagccttccacttcctagggcttagtttcaaatcatgaaaactgaatgctctatacttatctatgtacacagctcaattttattattttggaagaaagctatgcctgttacaaagatcactcataatttcagaacctggttaaagccagtgtgcaattttggagcagagacacaattttattaaaaaatttaaaatatgcatgtgtacatatatgtaggtagggactatcaaaagagatgtcaaaaccatctatttattctcatttttggatacagtacacattaccaagttgttacaatgtggttatttaaatatcatttgggccaggcacagtggtgcatgcttatagtcccagctgcttgggaggctgagttgggaagatcatttgagcccaggagatcagtgttggagtgtgctataatcatgcctgtaaacagccactgtactcccatctaggcaatatctcttaaaaaaaaaaaaagtaaaatcatgactctcatacattatacaatctacatgtttaaacattttatttaataatgacggaagtaggcagatgttataactttttcaaaggtaaaccaaaagaaaatccacagttatagatgaggaatattgaaatgagtgtgtagatggaggcagaactggcttcaaggaagtcagctgagtctctacctcacatgacagagtttacatgatgttagagaatgtttattttgcattgttatcacttacctacaacttccagacttgtaaaatagtttccatggaatcagaaattaattatgctggagagtgtgctatagacgatgcctagtgtttccttgaagcacatgttttcctatttgatgaaaaatagtcttaaaggaaggtttgtttatttaaatttggcctgatcatttacacgggtgtaccaagaatgttaatttagcatataagccttttaaactttgctttctctgatgtttttacaaaataaatctcctattgcacttttaaaagtattatttgctgtcctaagggtggaaagccaaacccaagaatcacggaaaggatcactgaaaggagtgatcaagcatgatcactgaatggcactctagaagtcttcactcagcccactggtctttctgtcaccggcagtacctgtaaatttgggtgaatttctttcttcttgatgttcccaaaatatcccaaagtaccctaccaagaagtgatctctctttccatctatgtggctggattctgtaaaccagctaccaggctagtttttctgggaggattggtactttatagagataaagtcacctttaattccctgtaagtgtttaatcatatctgattaaatgagcattactcacaaataggacattccagacaagatcttcaagatttttcatactcatcttggtaaataggaaggccaatttttactgaacccatgtaaataactgtgttgctatgaaaagtaagaagacttagagtttttggattctggggtgtcagaataagattccattttaaaacacttcatttcagtttataaaatcagaattgttatgagttataaatagcttaagaaaaaagagagcttccttatattctcagataatagaacactgacataagaccaacaatactcaaaacaatcatccttcatcatttcattgagtcctgtttaattaattcttgctgtactgaatcttgacttattaatctcatcaactcatctcatgaatttcttgactgaaagaagttctggaaatcttgactcagcccactggtctggtcaaagttatttaagcaatgacatcagaaacctgtacccaagagtctattctttgaagtcttaattattttaagtacctggtgcagttttttttttttattgtgggtgctctgaggttgtctttcttatttgaaaaccagaactctgttctactgtgttactgaatgcataactttcaaggaaacataaaagtaaaacaaaaaacggtgtaagtgacagactttacatggctgtggttaattttcacttacaacttttaaaagtgaaaaatatgatgagaatttataacaaaaataatgtaacgtatttgattatttctgtggcatgtaaaacaaagctagtaaagaatgttttacacaaaactatttaagcaaatgagctcatagaaactatgaagattttaacatatttcattacttttcagactcaggtattacaaagcaaggtaaataaaattcactttccatgttctgttctcattatgttctttcatattttggaacaaaataatactttacttcaagactattcatagggtgttccatgaggtcagaactacttccatagtatttctaagatgttattaccatgcagtatgctcattattgctagtttgaaatgaatcagcaagtcagcattttaaatttttttaagttccaatttttaatgttgtaaatatcaatagttaaaacccacacacactctcatagacacaaaataagctcattgaggtcctcaataagttttaggagataactgtaagcggtttggagaccaaaaatcttcagaaacattgcattaggacacaggtgttcttttccttgaaaaatggcagcatacacataattatatttcttagaaactgttgcttctagatatgatgtcaacttcttgcattagttttaatttttaaccaaattaactaacttctatttcacataaaaaaactgggggatagttacgatcttccttttccatatcagcattttagaggagatcatgaataaacataaccaactttctatagccacacacatctcttatgcaccttcataaattgacaacaatgaacacattcattaacttgacccaaagatagtcttctctgtagattataaaaataaaaagcaaaacgatgaaattttaaattatgattagtgctcagtgttttagtattctatcttaattagaaatggtgtaactatccaatgaatatctgttaattaatttaatatcagtctgaggtttcaaattacttaaaaatcttggaaattatgctcaagccaacatagtaagaagcataattactattgaagaaaagtttttgagaatattgatgcagtttggtcaaagaaaaataaagacaaacataaacataaaatagaaataatgctagcttatttggccaggaaaccagtatatttttaggtaaattatctagtgtagagttaaaatgtttactcatgtacttaaaactgataaagaagacttactgtttttattaagccaagatttattaaactaatcttatttggcaaagttacacgtaaattaagtgaacttgagttcataaaatgtttccgaggtaatgtatgcaagaatttattgtttaatttagtacatttaaatggttagagattcaattcttttctgtgaattttaggaatatttagtatatgtaagcacttacactgaataaggctattagaacaaaactcctttagtcttagagactttataatctcattattaataccatctgaggtaggaaaatattgtgcacacaatgaaaggtaaaggtacttttgaattgtagaccctcagatgtgtagaaagcatacagttccaattctagaatttcagccataggtcaagagtaaatacagaaacacaaaaagtttcactagtccaaattgcaaagagctattcctcttcccagtagacatgctgttcttaattatttgagctcaaaacagacacatagaccatcagaaaatactaacagactagaacttttttttctcaagtgttttaagtgatagaaatctaagcttactgtgtggcacatttcttaaagaagcttttctgtgtttaactgtacattttgtagttagcattttcattctcattgataaattcaacagacagcaggccagtcagcctgttttaggttctgtggatatagcagcagtaaataagacaaagtttctcttttcatgacactcatagttaatcaaattaatccctaatatgccaggtgataataggaatctaaagaaaaatattcatgaaaagagttgggctttcagtaaagaataacagggactgaatttattgttctattagaaacaaccaaaacaaaagataaaatacatgacacaatggtttgcatgacactggacataaggcagtaaggacagtgatccctgaaagaaagtaaacaaatgtagtcatctctttgagtgtcccagcttcctgccttgagagaattccaggcctccatgcagggcagagggaattcagaagtaccaagtggaactcagtagactttctgcattaggagaagatactgagagtccaggaagaacaaggtagcaaaaattcaaaggacagagtattaggggggaggggtgatgcacggagaaaggatcccagagatcttcagaggattgctttccgttattcattagagagttaattagctcatgcatttcaacaaacttcctgatgcctgggaaagaaccatccagaaggattagaggcaacagtgccttacattaacccatagccaggaacagtgctgattctcaccagcaggattggaaaaaccactagactcatggggcatagagtcaagtacatagtagggtcttgtctcagtattgagaaataatcagtcattgactgagcagtgctacagtttgccgtgacactttttattttttatctttttgagacagtttcattcttgttgcccaagctggagtgcaatggtactattgtggcccactgcaacctctgcctcctgggttcaagcgattctcctgcctcagcctcctgagtagctgagagctaatttttgtcatttttttagttgagatggggtttcaccatgttggcccggctggtcttgaactcctgacctcagatgatctacccaccttggcttcccaaagagctgggattacaggtgtgagccaccacaccctgccctcccagcacgtttaaaatgtgagttctgatagggtcaaactatttcaagtgacttaactgaattctaaaaccattttatggcattcaattacgaattaccagacattcaaggaaccaggagaataagacccataatgaagaggaaatcagtcaatcagaactgaatcagatgttagaattaacagagaatgatattttaaaaattatagtggtattccgtatgttcagacagttaagtagtataagagcaaaattgaacttctaatgtaaatactacaaggtatgaaataaaaaatatattatatgggattaacagcagattagacattgcaggagaaaagattagttaacttgaattcatagcaacagaaactagccaaaatgaaacatgaaaagattagagaatttgcagattgaacagagcatccgtgagctgtgtgaaaacttcatacagtctaatgcatgtaaattggagtctccagagagaggagggtgagaggacaaaagtaatttccaaatttgatgaaaatagtgcagaacatcagaaacataaagaaaattacaccaacacatattataatcagatttctcaaaaccaataagaaagggaaaatcttataaatagccaggaaatagtaaaaagacataaatgcagaggaacaaagactgacagcagatttttttttttctggaaaaaaaaaatgcactggagcaacatccttaaaagtactagaagaaaaaattgccaacctagaattgtatacccagtgaatataactttcaaaagacatggataagagaatgagatgataatccacaggctaggagaacagttttgcaaagtttgtatctgataaaggacttttatgcacaatatataaagagatcttaatattcagcattaagaaatcaaaaagcctagttgaaaaacgagcaaaagatttgaactgatgtgtcactaaaggcaatatacaaatggcaaataagcacatgaaaagatgctttacatctttaattattacataaaagcaaattaaaaccataataggtatatagtaatatattattacacacctattaaaatggctaaaatgaaaatgactgactacagcaagtgttggtgaggatattgaggaattgcaactcttttacacactagtgggaatataaaatgtacaaccataaactctagtttctctttagatcatgtaaatctttcccctttttaaagatacaaccaattgagagaacagtttgataatttattaaaatgttatatatgtatgtacaatatattctagccattccaatcctgggtttttacccaagagaaaagaaagcacatgtccatacaaatattttacatgaatgttcatagtagctttatttgtaatagccccaaattggaaattggccatatgttcattatcaacttaatgaatgaaaatttggtatattcatacaacagaatactacttagcattaaaaaggaacaatgtattgatacatgcaacaacatggattcatctcaaaataattatcctgagtaaaaaaagaagccacacaaaaaaggtacatattgtatggttccaatttatataaaatgctagaaaaagctgtttaatctacagtgacataaagtagatcagtggttgcttggagaggcaggcacagaattgggagggaggcattaccaaggggcaggagtaaacttttgtaggtgatgggtatgttcattatcatgactgtcaggatggctccacagatatatttataggtcaaaatttatcaaattttatcctttaaatatgtgcagtttattatatttcatttatacttcagtaaagctgttttaaaatgattataaaaactatttccctgctgttgttaacaccctgagatgtctgcctcttttcctatctttctgtgttttaaatacaccagcctactgcactttaatacctctctagctcagacagctacacacaaaacttactctgaagaatgtcaaaatgcatgttttcatcagagaaatatctcatggtcctttgttaaatgttcaaaaattcatgattgggctttataaggcaaatatgtcctgttttatagaattacgggagagaaaatgcatacaaaagagcccaatcctttttttggctggcttttatgtcagagctcaaaattgctctctgataaaatgtaggccaccagattgaattacttcattgaaccactgctgtcctctgttaatggtaattgcacagatatagcagtctttctcggcaacatctcagatatttacctcccactgtttttcaattcaaacctttgatgaaaatattcccagtacttctttaaagcagacatccaactgtctttcttgacaaaagcaaggtctctaaatcagatcctgacaatttgtgacacagcagtctatccaaatcaccttttacctatgtcactatgtcatttcctgaagaaaaaagtgtccatcagacaagcaatttctgtaggttttgggggctggaaggttggtatgccagcaaaaatgagagaggaaaagggaaaaataattttttcctttgacttgtgtggaaggaattcagtgaggggttgaccagatctaataagcaaaagaggggttttgtatatttaaaagatacatttttataaagagagatctatagatatttgttattttcaagatggtaacaattgaaacttgaatctagtgatttctgaaagctgctccctttaaggagacagggaaacaaggttagtttttttttaattcttaactttttctgttagactactttaatatgacaatatttagcagtttattttctcgtcagggattcagctcagtttctggtctacctcctgtcctgaactgagcagactacatttcctcacatgaaggttgtaggttgtacaaacaatgccactggcatgaaccatgatcagcgctctccacttgactcatggtgactttggaggctggagtgcagcacatggtaaccaggagatcagctggatcagcctcagagtgaaactcgctgctattatctctttggctatggttggttgggtgctttttttttcccttttagtattggaaggatataattgatacttgctttcttggatcaaattgtagcatcatatgtttgactgatgggttagttgtaggagctgtcagagcccccctgggacctgctttacaggtttggtgaatgagcagctgacagcacagcaagcacactttctgctgccagcctggttttgttcttcccaggtggatgtttcattataggaatgggcctcaaaataacatttgcccaggaatatttctagagagtggtcatctttggtggcactgttatggtggtatgttgctcatttagagtggtctcattcaagcaagacccatacatcatttggggagaacagtgaggaaaaccgtgggctgagctctggggagggttcgatctgggaataaggcatgtcctagaatctcagtcaggattctactttcaagagacagtgcaaggctcctaggaagttggggccaggaggtaattaaagaggtagaaagagaaaatcttttaaaatcaagtttctgactgcatgggctcttgaatgtggtctttactttgattgtggcctcaacatacaggtggtagcagagtccttgaagggcccttgacttttttttttttttcagagatcagggaatttgtaatttagaaggagaaaactggcactcttgtgccagtaaagcctctgctgatagctgtgtgccgtttgtttttaatcctttctcggtatccgtctctggccatccttatctttactagaaatcaaaggctgtgaagggaccaccagaaaaataaataattcatagcttttcaaagcctgagccccaaatactcaactttcaaagcatgagccccaaatatcccttcccttgggcttgaatttgctaaactggagcctgtgtttactctactagggtaaccaagtattcaagagctcagagaaaaaaggactggccactatacctctttggaggtaagagaggagcccgtgtgagttcatgtgtagaagaatcactttcacctggaatagaatgtcaatcccagaatctcactatctggcaggcaggaagtgataccagtttctggcttggaaaggacatctgaaggatcctgttggttttgttttgttttgttttgtttttttctcctgttggttttgtctgctgacacgtgggtagtgctgacccagtgtctgaccggattgtctccatccataacttcatctagccctgtttacaaaagaatgaacacaagtgacagcctcagtgaacctgcaccatgaggatgcccttacttctcccacactctcactttcttctcttcttggctcctcttcccctgtacttctctctgttgacatagaatatgcaaagtccaagagatgtggcaatgccagtaagagctaagttacttgcagctggcggtgccacctgtgcctatcaaatttcagccaaagcaattgctttcccagaatgccctgttttggggaattggaaagtgaatctgtaggggcggcaatggctgtatagaagagagcttttctctgggctcaaatatgaggacaaaattgtgaagtaggactgtagataatcccaaatccccacttttgcatcttcctgagctcagaggcaacccaagagatttccgagttaatcctttggactttaggtgaactctcagctagaaccatcgtttgcaagcagatctcctgtggaggtgacagttccataacctatcctggtggttgtatagttgagaatgtttgtgattccttctctctccacaagacctcaccacttccagttatgttcattttatttttgtttagtcatttttgtgcttagggaacaatttttcagctttgtactctcacctcataaaagtcctttgtatcattgtgaaaaagcaagtcaaggcctggcgtggtggctcatgcctataatcccagcactttgggaagccgaggcaggtggatcacgaggtcaggagtatgagaccagcctggccaacatagtgaaaccccatctctactaaaagtaaaaaaaaaaaaaaaaaaaaaaaaaaaaaaaaaaaattagctgggcgtggtggcaggcacctgtagtcccagctacttgggaggctgaggcaggagaatcgcttgaacctgggaggcagaggttgcagtgagccaagattgtgccatttcactccagcccgggtgacacagtgcaagactccgtcttaccaaaaaaaaaagcaagtgaaattgacattttaatttagtctgactgcatttttctataattttctaagaatttgtcactttttagtattttctcttttctgataaactgttccagcttttcatcactttttaatcagctttcatcagttttatcatactcaacctctggtatttttctttgtatgctctctttttctcctttttttgttttgttcatgagacaggtcttgctctgttgcccaggctggaatgcagtggtgtaatcttggctcattgcagcctcaaccacctgggcttaagcgatcctcctatctcagcctcccaaagtagttgggaccacaggcacatgccaccatgcctggctaattttttattgttttattatttatttatttgtttatttatttattttttctttaagagatgggggtctctccctatgttgcccagactggtgttgaactcctaggctcaagcaatcctcccaccttggcctcccaaagtgctaggaggcatgagccaccacacctggctcttttctgttgttcattctcttcacccttgtttagatcctaaagtgacccaggcacttcaggatctgaagatagctggatgatgatgagtcttcttaaaaggtagcattttatagcaaacatgatgtagagccactgaagggttttatagttgctgtcctcaggggctggatttttaaactggaatatccatggggactttgaaaattccacctgctggggctctacctcatttgagaaccactaccttaataagttcatggccttacaatgggagtgggaggagaggtgactttggagcagacaattacaatgtgagtgacagttatctctttcatgagtactgctgtacaaactgggaatgcctgatctggttcttggagagggagtggaggttaacctgatttatgtaaagttgtagtggtcatggcgggggaggaggttgcattccatgaagcaccatttggaaagacccaaagtgtggggcctggttatttggaggacctggagatgttgttggaatgcttagaaattacaggaatgaggataggaaggagccagatcccaagtggtcttgacaagtcttgttaaagagttttcatttcatagtgcaagtgatgtagagccactgaagggtttcatgttgtagaatttattagatgtgtgtgagagatagctcactcagttagttttgtggaagatggctgtgtaagcatgagattggaggcaagaacttcaggaaaaattatgatgatgactgggagagaaggtggacaattctagagatgtttagaacacaaaattgacaggacaaagtcaacgagtcaatgtggcagtgatttatagagaggcctcaaggataaccaagtatctgctttattcaaccaagtgagtgctggtacaattcactaagagaggcagtataggggagtgaataagagcacatatttgaatcctagacctgccactcgcctatgagttacattttgggtgtattcatttttaagacgtccatgggatgagcaaagaaagagatcctgtgggagtttgagtctggagctcagagaagcagcctggacctctggtgcacgtgatccatgcagtccatggatcagaactctttcaggaaaaaaaaaatgcggttattaggacaagtgttgagtatgtgtgatttttatttctttgtgatttagctggaggactatagagctgaccagaataaaggcaataaatatataaataatcatctacctatgatatactcaaggcaataaatatataaataatcatctacatatgatatgagtatatcattatctgctgtcattattattagtgaaggcatgttacatatttgtttggaccacagcatactttcaggaaactcttgataaacagctttcttttttatttattgccctgctttcttttgattgcttttgccgtagcatcaacctgcatcttattttaatcatctcctctctgaacattgatgattccgcagctttgttagaatacatcttgggagattccattttttaaaggctctttcaagggcatatggcattagatgattatgatatggcgcatttagaatatgccatgatttctctcctgctgaatccctcacacgtgtttgaagtaattattatcctctctgctagctcatgagacttgttagatcactatttgtgggtgtcataaaatgttggcaagaccccagtgtgaaacgcagtgtgaaatacatgtggttaaacttctctgattttgtatgtcaatcaaaacaaaatggcttaaaacagtagatgaatttcaaaagaaacttcaggattctagagcaaaaatgacacatggaactctttaggtctgtgttttgatatttaattcagggagtcatacacaggaggacgtatgcaatatagtagaatttagatgtgttatgattatatctgataatgttacaaatactgagcagctttttgttacatcatatttggtcccaaaatgtcatgccatgcaatgctgggggtgtttaaataccaaatttatgcatattttcaaggaagaagcagataatcttctaactatacagactgtgttacttatcagaaataatagtttatgaattgtcaaacagtgaaaattttaaaccatgtatccctgataatacttttatgtcttcattaagcatcactaatactgaatatgagtatctatctgatgaggaccttagaatcttattatagttagatataacaagattttatttattgtttttatcatggtgaagggtatataatgtcagcatgatctctcctttagttttacctcttctggtgttttgcagtcttaaatgggtgtctttaggaatatcccttatttctagttttagagctcttacttctagttttagagcttctacctaataaaggtataattagattggtcttttctgcatttattaatcaaagactattcttttacatgtgactttttagcaacatccataatttaagtgatatttgcccaaatattatctgtactcccacctttacaagaggatttaataacttaatagagtatgttatagtaatgagttggatgaccaaatatatttcaactaatagaaagaccatgatgtagctgctgaaatacctgagaaaggtagcttaccatataaagaaagacagctaggattttgatcaccttcttgctttagtgaatgatgctagatcttcctccaacgtaaatctttctgctcactttaattctagatgtgtgaattcttgacttgaggactttgatgtcagatttcacctacttgaaggcccattggaagaataacttctaactcattaaacaattccccatttagccaaagttagtctcatagatgtctgtgatggcttgttaggtggcacagtgactaaatttgatgctcagaaaagatggtcttaacaaagagttctttcttttcacacaagtgtaagctttctgacagttatcacccaaaatgcatcttgttattgttgtcttttctactcatggctgtgagtgtcagacactgtgcttccattcactaacatgaagacatttgtgaaagggccttcatcaatatctgacactggtgaattgaagaataatatactagctacataaaactgtgtttattcttcctaaaccaatcattgctttttgcagcatttccaatgaaattgtgattttttagcagattcttctttgatggagctgtgatttgcaataatcttgtcatgccaggctcaaaatactactaaatgaagacatttgtggaagggaatgattgtaaattgcatgcaaatttcaactcggctggaattaatcaatatggaaacagaacttgtgcgttcctgatataatgatgctgaaactaatcccatggagttctatttccgtgggaattaggcagttattttgctttaaatctatctctctctctcctttttttacccttgaagacaaagtcctgtttttgagttttttaaaagtaacttctttggggatttagagaggttataaaggaaacaggagtaaaatcaagcatctgacttcccctgtggggacatctgacatttcctatttaatttgctgtgcttgtttaatgaatctttcccccaatttttcttgctagtttttttttttcactgaaaattctaaggcttatgagatagtaggtgatgcaatctttattctatgttaaatatgcgacactggtctctaaatgggatgttctttcttttacaccagtttcttagggtgatcccagcttatccttgatgaaagctttttgtttttgttttttaagtcgcttttggaggaacaggtcaccaaccttgactttttaatgcctgcttacattcaaatttctcattttctttgattggcaagattaggtttatggccttttattcttacacttggcaactagatcggttaaccttagattatttgttccccaccttttcttcagctgtttaggtcacaaatttgtagaaaggtcttatcattggcatattttgtaccaccagtgcatcagtgctatactcatatatccttagaggctgacaacttacttcccagcccctttggagtactttaagaatccctttatttatagcccagcttaagccccagtgggtaacactccataaacctgcagtgacatccagtggcctcgtggtgtaattttttacaaacttttctaaaaggaattacaggggcagtatttcctgtcaaagaaaaatactgttggagttattgaagggggtttcctaaatacatttatgtacaatagttactggcatactccttgataggattactaggagaatgattattcattttttggtttttgagtgaaggattaacggcctctgatgaaatcagctttattccaagatcagataaaaaatataaaattgaggacaatatttttaagaggacaatttttaattaaaaaaaatcaacagtgtagaatttcctattctggatagatttaagaaataaaggagaggccgggcgcggtggctcacgcctgtaatcccagcactttgggaggccgaggcgggcggatcacgaggtcaggagatcgagaccatcccggctaaaacggtgaaaccccgtctctactaaaaatacaaaaaattagccgggcgtagtggcgggcgcctgtagtcccagctacttgggaggctgaggcaggagaatggcatgaacccgggaggcggagcttgcagtgagccgagatcccgccactgcactccagcctgggcgacagagcgagactccgtctcaaaaaaaaaaaaaaaaaaaaaaaaaaaaaaaaaaagaagtaaaggagaacctttagtttgtgcaactgatcatgaagtttaaaattctatgttgttccccttcttggttcttgtgcagtcaatgtctttgagagtcttcttccactgtgttaactctttaattttctcaaaccacctaagactgctactataaatcagagccaagagattcccaatctgattactgtctttaattgtattattaaacgaaaacatatttttataaaaatgatgccccattattataaaatatttacgtggtagaaaaatgtacgaagaaaatgtgagcacatcagtgcaaatcttacccttttcacagaaataaccagcgttaacatttggtaaacctctttgaaaatgctctctatatgctcttttatattctttccatgcatatatattgatagaacgataaataaattggaagctaagaaataatttcatgatactgaattgaacgacttataacggctgtgtttatttggtttgtaattaccgcaaaatgttatactaggtggggagaggaccaggaagaggtttgctttttttaaaagagatgactttgcctttcttgtgacagggagggctggctaggcaggatcaggtttgggagagggtcaatagagaggagtggtgtgcagccacctcatggctgccagctatgaggtttggtttagataagttaactgaggctggaatgggacagcatagttcatatgtttaaacacccaggacgagatgttcccagagctcagagagttcatacgagtaagtctagcatgtagaaactaagccagtagaatgttccaaactgatgctaggcacattcataccaaagatgagtgttaggttgtggtggtggggggggggggggcagagggggagggagaaggagagggagagatctttagatatctttagcaattgatactgaaccagaaatttgaaatttagatttcgctctgtcatgcccattccccagacacttctcagatacaatgcaaaagccatatgctactgggagagaggcaagaaacctgtttgccattctagtcctaacaaagattagctgctgtgggggaaggactatgaatctccccctgctttgcaaagaaatggggcaaacgtcgtttgcagttgagagagatcattttgcccatgattctgcactaatgcactgatcctctacctctggtagaggaacaggaaactttctcatgcccaagatattccaccaatacaaggcaaaacttggcttccccgtgggagggatgtggggaagaaaactgattgtatttcataccctgaactgagtaggaagcagagattacatgtcattggggtggaggaagaaatgctaagaaagtcatgtacttgagtcccagatgtgcagggctaggctaagactgtgcttggagcaggagaactgagaaattctccttcccccctccaagagccttcaaccataacaaagaaacagtaacaggcttgcagtctactgctagaggagtggcaagagcatgggaagaaacgcagacaccctgcaatgcttatgtgcaggtcctacttaggtcctactgtaagtttagggtggatcctgaacactgagaaaacctttttgacagcaaaaaataaaataaactttcatttctatatagatttagattacaaagttatgcaggtagaattctcgtataaaatcaatctagttttccctgttgttacatcttacacttgtaagatgtagttgttataagtagatgtaattgttataagatgtaattgttataagtagtaaaccaatattgctacattattattaaatgaagtacatactttattcaaattttcttagtttatactttactgatctttttctgttgtagtatcctatctaaagtaggatactatgttgtatgtttagtcattatatctcctcaggtgcctgtaagactgtgacagtttctcagatagtttttctttttgatgatagttttaaggagtactggtcaggtattttagagaatgttcttcgattggttggattaaaaaatttttttgatgtttttctcatgattagaccctcagttggcctctgttttgaatcttctagactcacaaaagactatgtcacagcagtctatcagaggaggaatttttatcctgtggtgcatcaacactagttatagcaacagtaaaatacagacacaattcaactactgagtagatttattcagtccccccatgctaacagcttgaaagaagtagttacccatttccaggtagaaatattatttacctgagtttcttttatacataaagtttgggttcaattaaaaaaattatgacatagacacactcacgtaagataaaaaaaaaaggtgactgttcaagatgtaaaatagtcaacaaaatctgacatgcaaacttcagacagggaccttgaaataactatgattactgtattaaaaggtttaatggaaaaggtggacaatatacataaatcgtgatgtggaattttagtagagtgatggaatctgtaagagtcagaaaaaaatgctagaaatgaaaaacacaatatcatatatgaaaaaattttctgtgggtttatcaacagacttgatacgatagaggaaagaataagtgaccttgaggataggctaataaagcctttcaactgaaatagagcaaaaagagtggaaataaaaaatggagcattgccatagaaaatttcctgaccgcctaacatacttcaagagagagaaaataggctagaagaaacgctagaagagataatggctgagaattttccaaaatgaaagatagccaaccacagactcagaataaatatgaagaaaagcatacctacgtacactgaagtcagactgctgaaaatcaaagataaagaagtcttgaagacagagaaaaaaataaatattcatgcagaggtataatagataaaagctcagtacattttatgtcagaaattatgttagtgaaaagagttggagtgacatctttaaaaaactgaaagaacaaataccctcaacctagaattctgtatccaggaaaaatatattgcaaaacggaaagtaaattaagtcttcgtcagatgaagcaagagaagttttgctagcagaacaggtctatctgaagagcttacaggaagctcttcagacagtaggaaaactcttcagatagcaggagtacgctgctctatagaaagaacattttgttctacacaaaggaatgatggacaccagaaatataaaaatatgaataaacagacaagacattttttcttctaatcttttgaaatgagattagagtatgggttgacaatgagcctggtatggtttgactctgtgtctccacccaaatctcatttcaaattgtaatccccacgtgttggaggaagggcctggtgggaggtgattggatcatgggggcagttccccactgctgttctcatgatagcgagtgagttctcatgagatctggtggtttaaaagtgtgtgacaattcctgcttgcttgctctctcctgctcccctatggtaagacgtgcttgtttccccttcaccttctgccatgattataagtttcctgaggcctctcagtcataatttctgttaaggctgtggaaccatgagtcgattaaacctcttttctttgtaaattacccagtctcaggtagttttttatagcagtgtgagaatggaccaatatgagtcaaatctaacatcaggcttgttttgtgcagcccatgagcaaataatttattttaagggttgtaaaaaatttttttaaatatagaataattaatgcatatgcaacaaagagcatatatggcttgcaaagtctaaattatttactatctggtgctggtttaaagcaaaaataataattctatattatggggtttataacatgttaaaataaaattttggcaataataccttaaaggatgggagggaggaaatggaaatatactgttgtaaggtttaaatggaaatatactgttgtaaggtttctgtacaatacatgaaatagtataataacatttcaaagtagactatgataagttaagaacgtatattgtgaattttagagcagccattggggaaaaagataaagtacaagatataattaacaagccaataaaatgaaatcataaaaatgctcagctaatacaaaagaaggcaaaaaaattaagaaaaaaagggaacaaaagaacagatgactttttttaaagtataatagtacatagataccatatcatccttagcaataattacactaaatataattggtcagttaaaaagcagagattataaaattggatagaaagtaaaacccaattttgtgctgcctgcaaaaaacccattttaaatacagagccatgactattttaaagcaaagaggatggaaaacagtatgtcatgcaaaccctaatcaaaagaaaactggagtggtctgggcttatgcttataatctgagcactttagaagtcggctggatcacttgagttcaggtgtttgagaccagcctggccaacatggtgaaaccctgtctctgctgaaagtataaaaattagccaggtgtggtggctcatgcctgtaatcccagctactctggaggctgaggcaggggaatcacttgaacctgggaggtagaggttgcagtgagccatgattgcaccactgcactccagcctggatgacagagggagactctcaacaaaaacaaacaaacaaaacaaaacaaaaacagaagtggttttgttaatatcaatacagtagacttcacaatattaccaagtataaagcatggtatcacacacaatatagtgataaagggatcagtccatcaagaaaacaagaattcatcaagaaaaaggcctatgtacacaataacagagcttcagaatacataaagcaaaaactaatagaattataggaagaatagacaaatctactaataaagtttgagatttcattgctcatccctcacattgatagaacaagttaacacagattaggaaggacaccaaaaacttgagcaacactaccggtcaccttgactcaatcaacatttatagaatgtgcccttcaacagcaaaatacagttttttgtccaaatgcacatgccatactcattgtagacatattttgagctattaagtaaatttcaataagtgtaaaagcattgaaatgatgcaaattatgttcactgaccacaacagacttaaactagaactcagtaacagaaggatacccggaatgtcctcaaatttttggaaattcgataacatacttttaaataacccatatcaaagagtaagtctcaaatctaatttgatttttacagtttacatgcctcttttttctaggcatttaaaaaatatacagaagtacagtctagactgcacatgtgtatataattgatgacagtgacattctctcggaatttatattaatgtagtgcacaatatatttgaagtacatttggcataaggacgtactaagtcacaagacttgtttggggaatgtgatttctttggataaaattaaattccttgaacttgacaactaatcaggctgaaaaaatacacttgaagctttctgatacattattaaggaagttacagaatatccatgaatttagttagctttacactccagtggtactcctgagtattttgtaattgaactcgttgatcttcagatgtgaattggttcttcagatctgtgaccatcagtctgtctacaaacatttatgcaggctctctgagcaagatgcctttcctcacggtggtttctaaactctcccaatattttcagctgcctgggtaggaagcattagggcagacgcccaggctggaatgcagtggcgtgatcttggctcactgcaatctctgcctcccaggttcaagagattctcctgcctcagcctcccgagtagctgggactacaggcgctgccaccacacctggctaatttttgtatttttagtagagacagggtttcaccatgttgactgggttggtcttgtactcctgaacctgaggtgacctgcccgccttggcttccctaagtgctggaattacaggtgtgagccagtgcacctggcctgctctgcttttaaagaagcagaatttgtctagatgtttttgaagaacattatgtaataaaatagcagtaagagtatgaattctcgatatgtattgaaaattagagtctttaaaagtcttggtgtttagaaattaatattagttttaatatgactctttaataatgaagaatataaagttctctgtgtgctggtgagaggactttttatttttactcctggaaatacatgatttgtaccagtcacttgtgtggccataatatttttgccctaaatattaggtcatcatttcctctttattgttaggtaacccagaatgctaggtattctctaacagaagaaaaaaaaattggtttgcagtcctggtaagctgttggagattttaataatcccaataaaatatttccatttttcaaatgtgtttagatgtccttggcagatttagattagttacatgagatggatagaaaacaggctcagggcttagggtttattttgatgatttttaaaatttgttgaaataagagttgttttatttaaggaaaaaataatatttctggattaagtatttcaaatgcgttatttttggagagatgctacagagcttatgtcaaatgattattaatatatatatattttttttgagacggcatctcactgtgtcacccaggctgaagtgcagtgtcgcgatcttggctcactgcaagctctgcttcctgagttcacgccattctcttgcctcagcctcccgagtagctgcggctacagacacgtgtcaccacacctagctaatttttttgtatttttagtagagacggggtttcactgtgttagccaggacgcttttgatctcccgacctcatgatctgcctgcgtctacctcccaaagtgctgggattacaggcatgagccaccgcatacggcctattaattcttaaaaacaattgtgaccatgatattagcacctaaagcactattccttttcttagccttgggaagacttcatggtcatgaatactattaatttgattttttaaaattatgagtgccatatggctgtagaatgcagaggtttcatgaaatatattcagtgagaaccagaagtgatttactaatgcctcaaactcatttaaatatctaccaattcaacatataaaattgtcttcacgagaaacattacggggtatgattttgtatttgatcataatgcttgctaattatttcctgttagtattactggtaaaatgggggttggcaaattctagatagtgatgccacatatgtgtggtgtgggttccttacaaaactttatttgctgcttaattttgtaacattgcatcattccctaaatagcctcaagatccaaatacaattgcagtaatacttgctgaaaattggaaactattaaaaacattcatttgctgggaatcaggagaggggagggaatttcaaataatagaggtttttttttattaaaaaaaaaaactcacaaaatctttgatccactgtctctcaaaaggcaatttgatagctaaatgcaagtattttttttttttttttttgagacagggtcttacttcttcgcccaggctggagtgcagtggcatgatctcagctcactgcaatctctacctcctgggctcaagcgatcctcccacctcagcctcccaagtagctgggtctacaggcatataccaccgctaatttttgtatttttgtagtgttggggcttcaccgtgttgtcaaggctggtcttgaactcctgagctcaagcaatccgcctgccttggccttcctggtgggattacagggattacagccactgcgcctagcctaaatatattaataagttttaaagttttatattatttccatttctattttggtagtaaaggtaaatgaacaagcattatagatcacagacatttaggttaaaaggtccaagctctttgagatgggatatactagggacacgttatcttttttttttttttttttgagatgaagtcttgctcttgtcccccaggctggagtgcggtggtgcgatctcagctcactgcaacctcactgcaacctccacctcccgggttcaagcgattctcctacctcaccttgccgagtagctgagattacaggtgcctgccaccacgcgtggctaatttttgtatttttagtagagacagggtttcaccattttggccaggctggtcttgaactcctgacctcgtgatccaccttcctcggcctcctagagtgctgggattacaggtgtgagccaccgcccccggccggggcacattgcctttataactctatttaattcccttgcttgcacgttgaatagatctaaatgactgggggaaaagtaaaaacatagtctttagtccctttcattgtggtaaattcactgaatgatagacggaaatttcagccttcttgggtctactgccaggttctgtagttatttgtatgtctcatggagaaatcctcattgattacactgtatggctaaactgacttaaaacagataactgagcctatttcaaaattgaaaattctttaaaatggaaagttagtactctattgttcccaaactgttggattgcatgccattttcccaaactcacagacgttgataagatttcaggcaaggggaacaaggaaggggtcacagtggaagcgaattcttcccctttttctgactgtgtttgcccacctgtcctttacccttcgcagttctattctgagaggtatgtgaggaagatgggagccactgctgctagattgttgccattaaccagctttcatggcttttgtgggagcctccttttcattagtatttgcaacatgttcaccagcaaaatgattatgttaggcagagacatcacatcacttacatttcatagctcagtgcaattttcataaactgcgaggcaacatccaaaaaaaacatgactcagaattagagtttcagaagattattatatagacattatttccctcaggtcacgggctttagtcaaatttggaggagaatgaaattgccaacagtgaaaagcagacagaaaggtatgagttcatgagcagagaaataacattttcatttgttccttccccatgggaaagattcagcattccggtaaatggagacggttataagaaatgaatttttgtcagcagggatgtgattttaaggctcacttatccattggcaatctagatttctaaccccaggaatctgggaaattgctacagaatgtagtctttattataaacaagtttttttttttgggggggggtagtttttccctccttcttttcttggtcagagctttttaagacgaaggactacatttctttctgcatttctggggtcagatgattgcagatttcccatctgccctgagtttctctccattgctgttgctttgtgatggaaaccctttctttcctcctcaccaagcttccctcactctgtcgttgcttttcctaacccccctgtgtttatccagcacgacactgacaatattgaaagctgcaaacttcctatatggccatggagtggtggatctatggcctgatctctctgttccccagcatttacaggatgtcttgtgctgctgctgattctatatcctcagttcttttgtgtctgtggacctgaaagagcaaggcaggaaatacagctttccaggtagctctcattttaccaggtataaagagcgaggatttgcaaggtttctgtaaggtaatcccagacaaccttcttcgtaattaaagaacgttctttcatgggaaattttattttccttcttcgatttcatcagatgcttctcagcccatcactcattcagattctatgcaatggttctttttctagctagagtacatccttgagagtagaaaatatttcatataatctaaacccttcatttctagagatgcagatagattctgtaacattaatctcacctttatattttttcaatttttaataacttgaaaatatgtatatctaatgccttctttccctatgcacttttgcttattttaatatttctcaacaccataagctatttgcccagctgcatccttattagacagtgctattgcctgccaaagctttttgagagcaaattgcattgccttcattattattatgtctacaatataatgattatgaaacatcattattatagttgattaataaatgataattgatgactctcagttcataggatttggcccatgaaattcatcacaatttgtaaacttttctccaaaccttcaaggattctaaaaggattgattttgctgcaaagtatatgcgattacattttttgatacctagtaagtagtagtggttgaggattcactggcctggccagagtgagggtgtatactaaatgtctgtggggtttcaatttcttcctattgaattcttttaaaatgtagagtctcttaccactgggagtttggggaacttcgcacagtggctcatgcctgtaatcccagtactttgggaggccgaggtaggtggatcacgaggtcaggagatcgagaccatcctggctaacacagtgaaaccctgtctctactaaaaatgcaaaaaattagccaggtatggtggtgggtgcctgtagtctgaggcaggagaatggcgtgaacccgggaggcggagcttgcagtgagccgaggtcgtgccactgtactccagcctgggcaacagagcgggaccccgtctcaaaaaaaaaaaaaaagaaagagagaaagaaaatgttgacggaaggcattctatctcagtctctgcaatgagccattcgcattttgtggaatcctttctggcattaattgggggacagaaacagcatctggcatatttacatgacagtagcatgtacttctcttttatatgtcattcattcgtacttccaataagttcttttctaatatgagcatacattgctttattgtgcttggcagatactgtattttttacaaattaaagttttgtgtaaaccttacatcaagcaagtctgtcagcaccgtttttccaacagcatatgctcacttcatgtctctgtgtgacattttggtaattcttgcactatttcaaacttttttattataattataactgttgtggtgatctgtgatcagtgatctttgatgttactattttagttattttggagtgacataaacctcgctatataagaacagtgtgtgttctgtttcaccaacctgcctttcctctctctctctctccttccctggccttcctattccctgagacacaacaatattgaaattaggtcagttaataacactacactggactctaagtgtttgagtgaaaaaagagtctcatgtcactcacttgaataaatcaaactctagaaatgatttagcttagtaaggaaggcatgttgaaagccaagatgggctgaaagctaagtctcttgcacctgttggccaagttgtgaatgcaaaggaaaagtgattaaaggaaataataggtgctactccagtgaacacatgagtgataagaaagtgaaacagcccttttgctgatatggagaaattttaggagtcttgatgggagatgaaaccagttacaacattcccttaagccaaaacctaatccatacaaggctctctgttcaattctgtggagagtgagagaggcaaggaagctgcagaagaaaagctggaagctatcagagtgtggtttaagaggtttaaggaaaggaactatctctagaacagaaaactgcagggtgaaacacaagtgctgatggagtagctgtggcatgttacccagaagatctagctaagatcattgataaaggtggccacgttgaataacagagttttactgtagacaaaacagccttctattagaagaagatgccacctatgactttcaaagctagaaaggagaagtcccatgcctagcttcaaaggacaggctgactcttcgtaggaggctaatgtagctggtgactttaagttgaaaccattgcttattttatcattccaaaaattgtagggcacttaaaaattatgccaaatctgccctgtgctctagaaataaaacaacaaagctgggatgacagcacatctgtttacgacatggtttactaaatattttaagcccgctattgagacctactgcttggaaaaaaagattccttttaaagtattactattcattgataatgtacatgatcacccaagggctctgatggagttgtacaaggagataaatgttgttttcatgcctggtgacagaacatttattttaccattcatggatcaagaagtaatttcaactttcaagtctcattatttaagaaatgcatttcataaggctttagccaccgtaattagtgatttcctctgatggatctgggcaaagtcaattgaaacctttagcaaaggattccccattctagatgccattaagaacattcatgacatataggaggaaatcaaaataccaacatgaacaggaatttggaagaagtttattccaaacttaatggatgtctttgaggtgttcaaggcttcagtagaggaaattgctgcagatgcatggaaatatcaagagaactagcattagaattggggccttgaaggtgttactgaatttctgcaatctcatcaccaaaattgaacagatgaggagttgcttctttatggatgaacaaagaaagtgttttcttgagatggagtctactcctggtgaagatgctgtgaatgttgttgaaactacagcaaagaatttagaatattccataaactcagttgataaatcagtggcggtatttgaggattgacttcactttttaaagaagttctatgtgggtaatatgctatcaaacagcttcccatgctacagagaaatctttcatgaaaggaagagtcagttgatggagcaaacttcattggtgtcttactgcaagaaattgccacagccacccaaccttcagcaaccaccagtctgatcagtcagcaaccatcaacatgtatgcaagaccctccaccagcaaaaagattatgacttgccaaaggatacctgcaaaaatccatccaccagactcaggtgtttgttagcatatttttagcaataaagcatttttaaaattaaggtaactacattgaatttttagacataatgctattatacacatatagcctaatatgtctattagttttagacataatgctatcaattatgttaataacttaacataatttttgtgttcactgggaaaccaaaagttcatgggacttgctttattgcaatattcattttattgtggtggtttggaaccaaatctacaatgtcttaggtattcctgtattttcattaagaagtagtatgactatctcacataaaggctgataacctggaagacacttagatttcaatatagtttggaacctgtctggattccatgtattacttcaacaggagtgaagaatcccatagtctgatgaatttttgcaggtattctcttcaccataatgaggtttcattagggttactgctagaataggattgtttgttattagtttccaatgaaggatggaatattctcaatgtaggaattcatagtacgtacaagaaagctatagatattgttagtataataattatacaatagtagtagtataataaaatattcaagcaatcacttaataattacttcaagtctcactgtctgccctccagaatcaggagcaggatgtctgaactcctcattctttacacttttactcaaaagctcttaactctagagacagtctttaactttttggtatttggtttcttcttttgtgcaatggcaatgattctgcctgtgcaaacaactgtcaactgtttttctcagcagtgctagtgtaaatgaagttgaatattaggaataattaaccttccttgcttacatatgccatttgataatgctcaatcttctttgttaagaaaacaatgcagtaaaatctttgttaattgagatgaagtgttgtttatttaaatttggatcattctgaaaaatatatttgttccaacaggcttattcctgaaaatctttctaaaatatgttcagtgtctgtctgccttagaatggtccccaaatataattgaatctctctctggtgatgggttgtcttgcacagcctaggacccatcatactggagtgcttttctctctgaatcaagcagcagataacggaatttggactgctttgatctcagatcataccctggaagttgtgttttaataagtaaatttcttatatgaattgttttcttagtgttgtacctcattcttcataaaagtaaaaagtatattagcaagttacagaacaagaagtatcatgttgcctaatcaatgcaaaatatcatcatttcctagacaacttcacaggagacatagcatgattagaaggtcagacttgattaaatcccgtgctttgcccttagttttttgaaatttcaaaggaggcaatctctctgtcaataaattttcaaattttataaataatagtaatcctgatgccagcaagcagttattgagctttgtgtgccaagtactgttctaagcatgtttcaagtaataactcacttcttcacaatgagcctttcaaggaggtactgttattgacatcatttttctagtgaggagcctgaggcttagattcagaaacctgtgagtcgccatatagctagtagctggccgagccatgatttgaacttagctgtgctcaaaaccaccacaccatgatacctcagagatgaatgtgtgcgtggtggttatgggagaagagaaccacatttacttattttttgtctgggtcttgcatggtgttttagatcatttcatttctgttatttcattttgaaacatttctactataattattatccatattttacatatagggaatctagtctcagaaaaactgaagcttataaccaatattttacagctagtgataatgagggagcagacatttgaacttgacaacctaaattcaggttctggctaggggtttcgttaaggaaaggaaaaattccctccaacaaaggtcatttttatgatgtgtaagtgatttaagctttctgtataccaccccaccccttacaaagatttgtgttttcatttttaattaaatctgtctgttctgcattctcattgtttggacttttttcaaatcattgctaatacactggttcttcttcctgttagtggtttgtggttgactggttcatcttctaccgttaacataattctgttttttttttttttttgaggtggagtcttgcgctgtcaccaggctggagtgcagtggcatgatcttggctcactgcaacctctgcctcccgggttcaagcgattctcctgcctcagcctcccgagtagctggggctacaggtgtgtgccaccacacccagctaatttttgtattttttgtagagacagggtttcatcattgttcttatttttatttgtcattcctggaaattaattttgctttgagtttgggacccctaacatgatgtcctttagccccgtgaagagtgaatgtccctgtggtgccattagccacttgtacagtgtcctgagaatattttaagagaaatatgaatggcagtaccacttggataccaattaaaaatacttttttttttcagtgaaatacgtctttaaacctgcaagacacagagggttggttctcttggtttccttagtcattattgacatcatctataactttctgttgaaataacaaggatttttatggaaagctgtttttgttcctgttcctgttgccagttttcacatccttatatattattaaagatacagaatgggcttttaatagatcctacaggccaggcacagtggctcatgcctgtaatcccagccctttgggaggctgaggcgggtggatcccatgaggtcaggagtttgagaccagcctggccaacatgacgaatccccgtctctactaaaaatacaaaaattagctgggcgtggtggcaggtgcctgtagtttcagctgttcaggaggctgaggcatgagaatcgcttgaacccagtagatggaggttgcagtgagctgagatggtgctgctcactccaacctgggcgacagagggagactgtctaaaaaaaaaaatgtaggtcttatggagtcacagagtcttaatgaatctccattgttatatgacagggtcttatggatgtcttttggaatgcccagcagcaagtgggcagcttcttaacaacccactgtgactcatgaggaagtgtgtctttgtgttgtttatgactgtgtttttatgggtaggacttcccactgtctcactttcctggcttgccttctcttctgtttaccctggccccacctttggctcagctgggcactacgggttttaccagagtcagttggaatgcaagtgcatcacaccagctctccatctccctgtggcattttatggctcagagaggattggaactaaaccttgggtggctcatgatcggttgtacccagccaagtctggagaaatggagaaaatgcctgggtttgttagtctacatgtccttcacattcttacagacacgtcttttgagtccagagaaatgtaaatcttttcctttttgtttttagtggtttatttctcaggccctgaagcatgagttttggtcacccctacagcaggggagatttcttcaaaaacagctgtgattatccgaaggtgttacattgtgcttttcttttcatgcatttttagcacctgcacatcatagttttcccgggaacctccagcagtgtcacctgctaacttggcagactggagagactctcaaagccatgtctgacttctgtgtccatctggattatttctgtcacatgatgatttggcagatgttttctgcagatctctagctctggtaaacaatggtgaactgggcccatatactcaacttgtaaagagtgatttccccaaaaacaggagacagacatttagcaagataggggctccttcatgtgaaagttgatctctaaggttagtataaattttctgatctagagggaattataggactctgaggcccacccttactagcttgccaccaggcttggtataaccttcattgcaaatgctaggattcatgctttggttgtacatgaaggggattatttctgggtggtattttatctcctactctcagactctttcagatctagctggatgttcaacataagccttttgtgtaattcccatgggctgtagctctgtggcttgagtagtggtcacaggagctctaatgccagaataaatgatgctgctaacagaaaaaagtagggctcatttctctgcaaaatgctgcacaaagaagactttctttgcttcttctggtacatgtggtaagcgtagaaatagtttattatggaagtctttcagccacaggtctttctaaggcaaaattgtatcctccagggaaactaaaataaataccagcctaataaacttcagattttaaaaaataagttatcatattgcatttctgtaagaagaaaaatatgaaaggttgatgtgtgtttttattccactttgatttacttcccaagctgtcctgtcccaattcaatcttaaaatggaagaaaatactttatcatttgaagaaggatgaatgtagtacagaattcaatttttaagaattcaaggtaggggaagtaaattttgatgccaactttcaagtttttaaagaataaaataaaataaacacatacacacacagttggctttgtgttggaagttaatgatagatgtcttctcggtattctttgcaaaggaagtcttccatccaggctttccctcatttgtttttaattacagtcatggtctacctggccttctcactagcactagctccctatgccttttgctttgctcttaggccgggcttttggtccctccctcctcatctctggttctctcgctattccttggctcctcttgtcttgctgcccagtttggctcaggtacatgaactgcaacctacattctgccatccctgcagctgcacaagcctgtcgttttccatactattgtattttcaggtctaacatgtcccctttttactgccctttctcagtctactttagtggttattatcttgtcatcaatctctttaaatatggctaggctccgaagattcctctattgactattgtgtttgctttattttataaaatttattattaaataaagctaggaaatgtaatataataggcttccatttacccaccacccagcttgaaaagcaattctgaatttgctatttatgttactaatttctttatatatttttcacatatgcaaatcaacaaatatatagtatgcttatattttggaaaattgtatcttattctttatgtgcttttttaactttttaaatggaagatgatgcttgtgagattaattcaggttgctatgttttgctcttccactactgcatagtattctattttaagcctatgccaccatttattctatttatgagcattcagattgttttcatttttgttattacgaacaatgtttctgtgaacatgcttgtacagatctccttgcacttctgtcaatttattatttcagcatattttattgagcacctattagtgcttggcgtgattgatacaagactgctaaaacaagtcgtatcttgaagccatatgctttagagagacaaacaggcaaattctgttgtaggagtcttctcacctatcttcttatttttatttcactcctcctttgtcatatttcacagttctgctaaagttaacttttttttttctttttttttttgagatggagttttgctcttgttgcccaggctggagtgcagtggcgccatctcggctcactgtaacctctgcttcctgggttcaaggattctcctgcctcagcctcctgagtagctgagattgcaggcactcgccaccacacccagctaatttttttgtatttttaatagagacggggtttcaccatgttggccaagctggtctggaactcctgacctcaggtgatccgcccccctcggcctcccaaagtgctgggattacaggcgtgagccaccaagcccagctgagctaactttttttttttttttttttgagatggagtctctctctgtcacccaggctggagtgcagtggaatgatcttggctcactgcaagctccacctcccaggttcacgccattctcctgcctcagcctcccgagtagctgggattacaggcacccgccaccacgcctggctaatttttttgtatttttagtagagacggtatttcatcgtgttagccaggatggtctcgatcgatctcctgacctcatgatccgcccatctcggcctcccaaagtgctgggattacaggcgtgagccaccacgcccagctgagctaactttttaaacatagttttaatcattactgttattgtcaaaaacattcaaagtctccctgttgcttatgtgataaagttgatactcctcagcttgccattcaagaaccatcctagcttaaccttttctcctgtttacatctcacccatacacctttcagatgccagtgtcatttccctttcatgcctctcagtgatatttctttacccttagctatcttgcctgttttgaactttatccaggatgttgaggctttactcagttttcaagatccaaatgaaatagtttattattcctcttatacccttcgtctaagtgtttattgcagatagtgggatatgcatttgtttagctgactaggagcaggaaccatatggtaattgcctccaacatagtaggacctcattaattaaaataataatttataatcaaatcgaactgaatggatcatttggttctcagctttgctgttaaaactctttaatggtcctaatgggaggagggagtagaaatagagtgaatgttttagttttctgttgcttttcaaatgtttctgactctcaataagtgcttgtagcttactaaccgagcaaccattctaagcgggatccttaccacatcaaagtgggataggttgagaagaaaactggctttagtaagagagacagattcttcataaaaaaaaaaaaaagaccatattctcaccttagtaggattgaactaaagcatacttaaaccagcttccattctcatctcttggtcacctcctttctgccttttgggtggcaatacacgttgatggcctgtcacctatcatgcccttctacttatctccagtccccagggtagaaggcagatgtggctgcatgtgaataaggggaagcccgagtccactgtgtccgcgtttccattttgaaggaaaatgggagaaatgaggccagtggtttgataaattatatcaaaaatagtcccttcatgctaatggagtgcgaagaagctgatgtactggagatgatctataatatttcatatttctctgaggagaaaaatgataaacttgatgatgtgcaatttattcatgtttcttcagatgagaaaaaaaaatcctcaagtcaactaactgcctgtttctcactcctggaagctggcatgtggattttacactgggattggaggctgggcttgtttagagaaatgcctagagagactttgattaatcaccagacctttggcagttggttgggagagggtaattacgctagcattgccactattttatcatcgctattttatggctctacaccgccaggtgacaaatgtgttaattattgcatttcttatcctggacttctcttgcctgccccctcccctcatggttttggcccttagtccttctctgcagctcagccctggacggcagtaacttgtgcaatcaaagagctgttctttgggagccatgctgagagggacagggctatcagccctgctgtgtgcagacgctaaccacggggagctggttaattccctttcctcttccttctgcccatcaccctttgggtcaagtgctgctcagagccagaagctccactggcttctttaataactgaaaatagcacccctggactgggccatttcactctaaatagccccctggaggaggttagaaacagaggttgtcttaggcaaagagatttaggaggtaaaattgtcctttttctgtctttttcttttttttttttttttgttgccccttctgtctttctgttacccagagaaagcttcacaagcatgcctgtaatttagttgcaccattttattacagctgaaagaattgaatgtaaagaaggaagtttaatagaacatataattcagcagatttattgatggggaggtatctattgtagtttggccagtgaaggcaggtcatagaggaaaatttaggtaagtcggattttctttaaaaagaggcccaagagttagtacctcaggattttgttttcttctgttccttgggcatgctggaaatttgttagctcttaaatcaacaacttgttattgacagtcatctttttgctggagaacgtattaaaataagtataattatggtgcctgacctcaaaaagaaaaccagttggttatataactctaaaaagatgagtagccacagagtgtagaaagccacagagaagagcaaatgccattgttgggaagcagagcctatgctgggtaaagtttcctgggagtttcatcctccaagaacaagaatttcttcttctgaccctccaccttctctggaaatggggtgccacatcttttgccttctggctaaatttttgtttattatatgcctctttcactagaatgcaagaacatgactacttggttatgttcttgcttgtaatccttgtttttagaacaagacctgacaactcgattatggtcagtatatatattttttggatgtatgaatgaataaatgaaatgagatcttaacatgtaactatcttcttttagactacacagggttttgactataattgaaatttttaggcttcttcagctctctcttttttgggtccaaaggatgtctcaaaccaaataagaaattccttcttattgatctagtggttacagacaagagacgccagccttctttgtcttttggaagttaggagtgtgtccctgaggaaactatgccctgggaaggttctttatttataatacaaaatttcttttttgtggttgagctagatacagatatttttcaatttttcctttcttcgaaggctatattttggcttaatctgtacttacagcataactattcatgctaattataattcatatatgaaaatgcaccaaatatgactattagaagcttttgaaatactgtttgatactttgcaatatagttatttatgcatatctgcatttgattttaaacttcttgaagtaatgttttatttatttttgtatctccattgctcagcaaagggtggcacatagtaggtccttcatgaactaatattcactagagcactgtgggaacttatttgcaacacccttggcatctctcttatccattggggatagcaagtaatttgaactgtcaaaaccagtggtgttgctttgggcctaaatgacattaaactttttttttttttttttttttttttttaagaaacgaggatcttcctatgttgcgctcgctagtggtcttcaacctctggcctcaagtgatcctcctaccttggcctcccaaagtgctgggattacagttgtgagccaccgcacctggccccaacattcaactgttttttctgacagtaactaagaatgggataaatgcctctctgaggcctttcccagtttgtgaggccacttgtcttattatttgtgattgcaggaggacatgcatcatattcatctaaaggttgaatacatttatttaattgtggcttgtgaagaaagaagagctaatatgtggtcacgttttatgctatttaggatcgaaaatcagtcagtcatgaagccatttcttttcattctacttttggagatcatattatgataagcttttcagaagcattaataacctagactcaagcctatgtagtttggaccttcatgtctttacatgtgtagaatcaaagagcaataggagttggtgtatatgtgacttgagaagcctcacatcattcttggaatatgttgtcactagtgtcatcagtggggcctacgtgccctgcctgccaactcaggaaaggcgtgagattgagggatctagatttagcatttattgaggaaaaagtgttgtataaactattgaaattttacataaaaaacaaatagatctgttttgggaaatgaagattttcaaaagaaatatggtccattttgaaagagataattgcaggatatattttagtgtggcctggagcttaccaatcagaatgatattttgacattcatggtgtcaaaaggtaatttctttttgccttgaatcttatgcttgaagtatgttattcatgtagctatatataatgggattacattttaggggaacttcgggatgatatgtaaaaatcctgaagaagttgtctttgtgttttaaaacaagaaaaacttgacacaaactggcttacaggaatgtgtttcttgcaggtttcccttagaagccacacaggaggcagttttcattggctgatgatgtttatgggtataaaaaagaaactttgggaggatttgataaagtctcttttcagcttaagataacatcattttactcacgttagagcgtttgtgtgtgattggagttttgatggtggttatatttttggctttttttaatgtttgttgcttactgccattcctgaaccaaaagataagttgttcagataattgcaaagacagattatggtaatagtgatactaatatctaacatactacattaaatatgtggaatttaatttaattttttgagatggagtctcactctgtcacccgggctggagtgcagtggcgtgatgtcagctcactgcaacctccgcctcctgggttgaaggattctcctgcctcagccttctgagtagctggaattacaggcgcccgccaccatgtcccagttaatttttgcatttttagtagagatgaggtttcacctgttggccaggctggtcctgaactcctgacctcaggtgatccacctgcctcagcctcccaaagtgctggcattataggcatgagccaccgtgcccagccaatatgtgtaattttaattatttagcacttatagcaattttataagatgggtactttgtttatccctattttttagataaggaaactgaggcagcagaggttaaagaaacttgcccaaagttaggtagctaataagtagtagaagcaggattcaaactgaggtattctggctctgtaatccatgctcttctatgcactgcctttgcaaatctaatttcaacttgaaatgagttcagtggattgatagtagattagtaggggagccattccaaagagtttcttataattaagtgaacttgagaatgtaactggcaacagtgaagagattcccactctatttcatctgtaactttctgatcttaccgtggtggtcacatttgttgtaagaatatttatggtggtgtttaggataagtttaaggaaatgttgatcactttttgtttgatctgagatattgatagatatttatatactttataaataggtaattaggtatatatgtaaatatgtaagatatatacctattaattacctattaaatcattcatgctggcctctgggtatttacatgaatttttttcagtaagtcttgcctttcagatatatataaactagattatgcttaaatatttatttggacaagtgttttcctctttagttaagaggccatcttctgaaaaattagactgcagtaaagcagtaattccgcctcagttttccatgagggaagatttgtcatggctactcctacttttggcattataatcacgtgaacttattattcaaattaatggcttcttggcataattttcagaggtctctactgcaaatctcagacatctacaaatcagtacatgtcataataaaaggaagaatacagactgtcagacatactcaactagtcttctttttttttttttttttttttgagacggagtcactagtcttcttttggaatcacatcaggaaagggaagttgttagtgcttatgccaggtagctggaagacatctttgtgatatttatgaagatcagccctgttgggcaatcgttgcctctgccagaatgacttacccatttatctaataaagggaaacatctaaattcttgaacatgtaataattcacttgataaaattcaggtttttataaacaaatcatattaaaaccccaaaagttaattaacaggtgataaaccttgcttttacttccttgtcccatcacattcattcatagtcataatacactgacaattattgagtgcctttgatgtgccaaaagcacttgctaaatgctttgtttggaaagggatgtttgttaattggggtggtacctcccaaataatgaaacatacacacttttgttttattgaggatagggttttatcattccacagctgttccttgagtaagatccgggcttgaaaggccaagttcttctacaggggcggatctttgaggaggaagaggcaggtagctaggaagggctaggaggctacagaggttaaaagtggtctgagattagggagaatggctaaaagtgagtgagattttctctcgtgtgtgaataattgtaggaagagattctggacaacatatgcagaggaacaaatggagggatggtctttagtcagtggaagtggaaatccattggatcatccatgagcccatctgaaatcagcagcccgttaggtagaagcttgaaaaaaagaactgttgtgtttggtgaatatatcacgattttggagaatgatgagggcagaatcctgcatcctttctagctttcttgagaactttgtacgagagtcactcttaccatcatctaaatataagtgatgtgtcctgctgttaaggaattccaccatttgctagctagtggacataaatgggcatcttgttttcttttctttctttctttcttttttttttttttgagacggagttgcgctctgtcgcccaggctggagtgcagtggcctcccaaagtgctgagattgcaggtgtgagccaccgcaaccggctgcatctttttttctttattaattatttatatgtctggaagtctagatatatatttgtcttcgggaatggaaaggtaccaataggaaattttgagtaagccagagtattctagcaaatataggaattacgccaagaacagccagaattgcccagcactagtgataacctggtgaaaagaaagaccatcaatttatgtgttccaaaaatgatgtcagcattgcaagaggagagctgactgcgtaggctcatcctcatttctcaggagagtgtgcctgtaaatgaccaaccaattacaagcagatgataatgaagcaaaatgatgtaaatcaagatctgaggagtgacatttatggccaagacttgataaatatggaattggagaaagaagataggaaacaccagaggaggacagcaaggactgtagttttttttactgtggataagcccaactccctactgtggcattgaatcttggccaggcaatagtttgattgctgatttccttagaagggaaggattcttgtgtaggattaaagtaaaagtaattccatgacaacttgttactgaggaagacagccaaatacatatttcatgagtaagcaacagtcattttggtggaatatggtgtgttacgtaaagcttggtgctagattaatgcccaggtgaccacttggaggacaatcagtgtagccctgtgaaagatacaaagtattgcctgcctaagtctcagtttctttgtctgtaaaatgtgtgtttaagtggagctgtgagacaatgagaatatatgtaaggtgcctggcacttaacagttgttcagtttctctctcttgagcatcctcaaagctccttttattgatttctttgatgctgaaagaaagagaataaattttgactgcacgatgagcttcattttttgaaggtgctgattctcacccccatttccagctacattgactatcgttagccacttgttacccatctagtgaagccatcttctatagtgcagtgtgtgttagtaggaaaggcttatttggccttgaagggctcgtttggccttgatccggtactgattgtggtttgaggttgagcatgttaaggatgaatagtagctggaatggtccatgatgtgtgcttagtatccttcagaatgtttacatagtcatatttagattgcttctgagaacaagagaatacagaacaaaatgttatgttccaaataaagatcacaataagaagaaatattgcccttctagcttggcatcctttttctgccatgatttccctttgcattttcttcccataccttagctttagccaaggatacagcagtaagtgttgcttggtatttaatcaaattaaaacctgtgctaggtaatgcctcatagattttattttgccaagatagatgtttgaacggaaaaagaaatagtgtatattaaggactaaagggggtactcttgttttctttcaaatatgataattagtataaaactgtctttttcctgccagttggctcatctcatctcctagcagctgttttaaattccttaattgtctattgcttactcagctatcatttcacaaatttcctcactgccgcattttcgttgaagcaaattctgacagtgggggatgctcacctcacaggctgggttgagctgagttctagttatcctctttgagtaacaggattaactatcattagacagtgcattcgggtaaggtgatggttccctaggtctctttggagttgattactatagaaatgggcatctggtggagcctcaggttgccaattgcattactcttcattttactgatgtttcaattctgtttaacccaacgtagacttttttttatgcttataaagtaataggagtttcctagaggatttgcagcgtacactattgtataatctcattgcttataattttttttcagaatgaaggaagtgggtattttaaccatagcattttcattccagtatcattaaccatttaaatacactttgttaaatctatcacattttctgttaaaataatgtaaaattctagtagaaattttaacagtatcttactgtaaaaatactgtaggtaatagaccctgagataagacagtctgctgctttcagaagcatcaacacagagcattcctcaagcatttgatttaagtaaatattattgaagccttactaaattcaatttcagatattgtgctctttgatagcacaatgacagcttacatatgatgctttcaaatgtcatccacttatttctttttttttttttttttttttttttgagacagagtctcctctgttgcccaggctggagtgcagtggcgcaatctcggctcactgcaagctctgcctcccgggtttacaccattctcccacctcagcctccctagtagctgggactacaggtgctcgccaccatgcctggctaattttgtttttgtatttttagtagagacggggtttaaccatattagccaggatggtctcggtctcctgacctcatgatcctcccaccttggcctcccaaagtgctgggattataggcgtgagccaccacacccagcccacttatttcttaatgatgggaaaactggtaatacaagaccaaatttttgtttatacatcaaattatcaactttcatgtcttatttcatagtcatgcattgcaggaatgtgcgtactgcataaagtgacttgctttatcaggtttgaaattcataatacagtcagaagatgattaacagatttgttcaaatttttatgctacgatatgttcttgtccccatgtgaataaatgcaacagattgtttgtaaccattttaattgctctgattttacatggacaatagttttgtataagaaaagacaaaaaaggccaggcccggtggctcacaactgtaatcctagcactttgggaggccgaggtgggtggatcacttggggttaggagtttaaaaccagcctggctaacatggtaaaatcctgtctctactaaaaatacaaaaaaaaaaattagctaggcgtggtggtgggtgcctataatcccagctattcaggaggctgaggcaggggagaaagaaaaaaaaaaagaaaagagaaaagtagtcacttggtttaaatgcctggattttgaaacctaactccttgttttacctctgtagttttaggcaaatcacttaacttgattgaatctcagttactctcactataaaaatgggaccagtaataccttcttcaatgtgatcttgagaagattcactggaataatggtgaaagtaccctatcacagaatttatagtaggtgctaaaaatgttgtgtaccttcctttccttcccttagaaagacagtctcttttatttattgattgtacttttgccaccacagggggaaaaaaatccctgtttcttataaaactttctaggaaattcatgaatttagtgtgggccctctaattctgacaaatacaatattgattttgagtttgttgctttaaatttgccaaatgaaacgaaagttttacggttttccttttaagtcacttctgatatgtggagcaaacaagtctgtatttaatagtaagtagtttgctaattgcaaagcactaccaacttaacacaacttaaaatgagaagctgagagggggccagagcatgaaataagtaagtaggttaagaactgccacacagtccatcatgcttgcagagaagaatgtgagactgtccgaggctacagtgctggtcaccttagcctgtgtaaactctcactttctcagttatcagtggaagacaggggttaatccttattagtctgaacacatcacattgcaatgatctgaaagctaaagacatggcataaaggaactctgaagaaaccacctccactgagactgctgatgcttcgaatggaatttgggcagatggaatgctcatttaaggagcaaatgacatggacggggggagtcaaaatgataaagggagcctccttgcatttgttgtatcttacttctgtgtgagttctggcaaaaagcaagcatgactagaaccctagaaaaacaaccattaggtagatactagttatagtcaatcagagaaagccagtatgtgcgaagagagaagagaagaaaaccacatggtaaaaatgtaatcaaccagtgggattcttttagttcataattgtaatcatagatggcattccactacctttgtcttccatctggaccaagtatggctgtgtctagaggttctgttgtactatttctgtggtccttgaactctgatggcaacctaccttgacaaggccaaaaacctacacaactctgagcctttcttggtagtggcattatctaaacgtatgcatttgtaccttatcaggcttaatgagggaaaagaaacggcttttgaagacactaatgggaaattattataagtcaatgaagtaaaaatgcaaatagatttgtatcttaaaacaggaatactgctagaagctaaaactgagtaagatcttgctctgtgccaagcacatgctattttgcattaaaagagacccctgccttctacatagtatcctcattttacgggtagaaatcttgaggtttagagacgtaaagtaaagtaactcacctaaagttacatagctcatgagcaatgtggcagatgtttaaggacacctcgtctgatttcagcgcctaaatgaagagccttttacaaggatgatgatttttgcagcaacaagacaaagatgtccagcaataggaaaaagattgtaaagaaatgttaatccctgtagagggcactgttcagatttaactcatccaacataattttctaacatgataaagcagacctgcgccagctcctgactgtttcagataggtttgcctctggggaagaaagtgcagtgattcgtgtaacctactgtcagtgttatttaaatctcagacctaatctagaatttactttaataatcttttattattttcctgtatattcttatgatttctcccttctcaatgaataatgaatttagcataatgaattcagttagttctaggcttcttcatatctatatttaatattcaaagcactttcttctcttttattcctgatttaccaaaatctgtgattgtgccatgaaaagatgataaaggagaccatctcttggatctggaaagtgctgcgtgttagtttataactgggcaaatgtaagcataacgtttggccagggttgggtgcggtggctcacgcctgtaatcccagcactttgggaggtcaagatgggtagatctctttaggtcaggcatttgagaccagcctggccaacatggtgaaaccctgtctctactaaaaatacaaaaattagctggatgtggtgacagacacctgtaattccagctactcaggaggctgaggcaagagaatcacttgaacctgggaggcagaggtggcagtgaaccgagagtggcactgcactctaacctgggcgacagagcgagaccctgtctcaaaaataaataaataaataaaaaataaaaaaagtttgaccagaggactacctccattgtctttcttttctacaatccagtttagatactttctggactaaccataacttacatgcttgtccaggagtattggccagagttagagtggtcacattaattctaggcaagggtgaagatgaaggagtagagccatgtttccttgaaggacagtgatgatgctttttagagcttattacgtgtttgctatctctcccatcccaagcagtcaggggttttaactttgaagataataataactgtcttcagtgggtgaatttacatctgttttgacccaaaagataatttaggatgacttatggaatctgaagctaaatgtcaaatgtaattaaatgttactgttgtgtcttgccttaagaagagagctggtgagttctagcagggtttgggaactatttggattaactgctttgattctttcccacattatataagaggtgttatctcagacagcacagaaattgtccctgggggacagggaggcatcacatttcagaagtacctataatatttcttcagcatgtctttgggcctggctttctcaatatttctaccttttcttgaaatctccacttggatatggctctggaagatggcagaaacgccatcttaaaatatacataatatttttaagaaatcagttttgaaaaacaagaagtctcttttcctgacggtccttcctcaatatgcttaaattattgaataggaaagcttcagtaagacacaactattaacataagtgctaaggattaagaaaaagatctgtcacaaattatgtctgtctgtaggaaggtaaagttgtgcctttgatatgacacctacccctggaaatcatattcttttccaagatataaacccaaatcagaatagggagtgagctgttaatatgaatactgaatctggacaggcacggtggctcacgcctgtaatcccagcactttgggaggctgaggtgggcatatcccttgaggtcaggagttcaagaccagcctggccaacatggtgaaaccctgtctctactaaaaatacaaaagaaaattagtcgggcactgtgctgtgtatcagtagtcccggctacttgggaagctgaggcacaaaaatcgcttgaacttgggaggcagaggttgcagtgacccgagattgtgccgctgcactccagcctgcacgacacagtgaaattctgtctcaaagaacaaaacaaaaccaaaagaattctaaatctgctctgaatagtagaagacaatgggagacatttatctttggtagcaacatattccaaagacttaagagtttaaagaaatcatcattttcctatcgcttccttcctttctctctcaatcctaaaatactctctgggcaatcaatttcggaattctttcaaggaaaggaaaccttgattcgtctgcctgttaactactacaaaatgtgtagattcctgctcttccatgttactactcagagtaataacgaaacacctattattgtcattatctggagaaaagaagctcctatactggattaaatgatgttgctgtgcccataagaaaggcaggtattgggcagtaatgaaggtatggcagcaggaatttatactttgtctctttcatcagagtagctcccccctcccctttttatcctgtaggaggaaattgtggagtgagagaagaggtctgatctgtttggggaaaaagtatcacagcctattagttagaagcaatgaaattgagacagctttgggactccattaagtgtgtggtgtttaggcagactgtgtccctgggtaaagtgtgctgttgaagaggatagtacacaatgaaataattgggcttgggaaatcaactgggcttcagcagcctcatatctccttgtggggaatgggtgagggagctacagctttccctcccttcttttagcataaaagctataccgaataaaatagaagggaatttcttgctgagtagatggactgtgaatatattttgaataacacaaacaatggagataattaaattttgtctggcacaggaaggattcagagcatgtcacttggaaccccctcatgccatgttcttctctaggcgtctggatatatggttgcagcaactgaataaaaataactcagatttgatcagtaatggcagcatctatagggacatgttttaatgcactgatgtgtatgaaattaggttcttaaataaaacattattcctggatattttcatttcaaaggataagctgaaattcacgaacagtgtgaactagactgacttttcccactgagatttactgataggcaaacttttgtgcacattgtggacactggttgagggtaggctcactagttttggtactattaatggtcagttgcctgtagaacttgtgaagtaagaaaaggtatatctatagcaagttcaaggttcagataattgttgttctctcttaagaaaaaggttttgagcggttgtcttctttacacttagtgtatgtaatgatagtttggctaaatatgaagaagaaagagaaatagcattactactgtttattaataacttttctttgtgccacacatttagctattcaggcactttgtgtttgtgtgtatacatatacattctcttatatacatttgcgacatgtggtaaaaggccctactttttggagtcagaaattgtgctcatttctgtatctgccaccttgtagctgttggctcttgaacaacaactaagcctctactttgaacatcaattttctcagtaaaatgagggaactagactaaatagttgccaaaattcttagtccacacacacacacacacacacacacccattttgtacttctaaagacactggaaagaagtttacggatggaggaggagccaagatggccgaataggaacagctccggtctacagctcccagcgtgagcgacgcagaagacgggtgatttctgcatttccatctgaggtaccgggttcatctcactagggagtgccagacagtgggcgcaggccagtgtgtgtgcgcaccgtgcgcgagccgaagcagggcgaggcattgcctcacctgggaagcgcaaggggtcagggagttccctttccgagtcaaagaaaggggtgacggacgcacctggaaaatcgggtcactcccacccgaatattgcgcttttcagaccggcttaagaaacggcgcaccacgagactatatcccacacctggctcagagggtcctacgcccacggaatctcgctgattgctagcacagcagtctgagatcaaactgcaaggcggcaacgaggctgggggaggggcgcccgccattgcccaggcttgcttaggtaaacaaagcagccgggaagctcgaactgggtggagcccaccacagctcaaggaggcctgcctgcctctgtaggctccacctctgggggcagggcacagacaaacaaaaagacagcagtaacctctgcagacttaagtgtccctgtctgacagctttgaagagagcagtggttctcccagcacgcagctggagatctgagaacgggcagactgcctcctcaagtgggtccctgacccctgacccccgagcagcctaactgggaggcaccccccagcaggggcacactgacacctcacacggcagggtattccaacagacctgcagctgagggtcctgtctgttagaaggaaaactaacaaccagaaaggacatctacaccgaaaacccatctgtacatcaccatcatcaaagaccaaaatagataaaaccacaaagatggggaaaaaacagaacagaaaaactggaaactctaaaacgcagagcgcctctcctcctccaaaggaacgcagttcctcaccagcaacagaacaaagctggatggagaatgattttgacaagctgagagaagaaggcttcagacgatcaaattactctgagctacgggataacattcaaaccaaaggcaaagaagttgaaaactttgaaaaaaatttagaagaatgtataactagaataaccaatacagagaagtgcttaaaggagctgatggagctgaaaaccaaggctcgagaactaagtgaagaatgcagaagcctcaggagccgatgcgatcaactggaagaaagggtatcagcaatggaagatgaaatgaatgaaatgaagcgagaagggaagtttagagaaaaaagaataaaaagaaatgagcaaagcctccaagaaatatgggactatgtgaaaagaccaaatctacgtctgattggtgtacctgaaagtgatgtggagaatggaaccaagttggaaaacactctgcaggatattatccaggagaacttccccaatctagcaaggcaggccaacgttcagattcaggaaatacagagaacaccacaaagatactcctcgagaagagcaactccaagacacataattgtcagattcaccaaagttgaaatgaaggaaaaaatgttaagggcaaccagagagaaaggtcgggttaccctcaaaggaaagcccatcagactaacagcggatctctcggcagaaaccctacaagccagaagagagtgggggccaatattcaacattcttaaagaaaagaattttcaacccagaatttcatatccagccaaactaagcttcataagtgaaggagaaataaaatactttatagacaagcaaatgctgagagattttgtcaccaccaggcctgccctaaaagagctcctgaaggaagcgctaaacatggaaaggaacaaccggtaccagccgctgcaaaatcatgccaaaatgtaaagaccatcgagactaggaagaaactgcatcaactaatgagcaaaatcaccagctaacatcataatgacaggatcaaattcacacataacaatattaactttaaatataaatggactaaattctgcaattaaaagacacagactggcaagttggataaagagtcaagacccatcagtgtgctgtattcaggaaacccatctcacgtgcagagacacacataggctcaaaataaaaggatggaggaagatctaccaagccaatggaaaacaaaaaaaggcaggggttgcaatcctagtctctgataaaacagactttaaaccaacaaagatcaaaagagacaaagaaggccattacataatggtaaagggatcaattcaacaagaggagctaactatcctaaatatttatgcacccaatacaggagcacccagattcataaagcaagtcctcagtgacctacaaagagacttagactcccacacattaataatgggagactttaacaccccactgtcaacattagacagatcaacgagacagaaagtcaacaaggatacccaggaattgaactcagctctgcaccaagcagacctaatagacatctacagaactctccaccccaaatcaacagaatatacatttttttcagcaccacaccacacctattccaaaattgaccacatacttggaagtaaagctctcctcagcaaatgtaaaagaacagaaattataacaaactatctctcagaccacagtgcaatcaaactagaactcaggattaagaatctcactcaaagccgctcaactacatggaaactgaacaacctgctcctgaatgactactgggtacataacgaaatgaaggcagaaataaagatattctttgaaaccaacgagaacaaagacaccacataccagaatctctgggatgcattcaaagcagtgtgtagagggaaatttatagcactaaatgcctacaagagaaagcaggaaagatccaaaattgacaccctaacatcacaattaaaagaactagaaaagcaagagcaaacacattcaaaagctagcagaaggcaagaaataactaaaatcagagcagaactgaaggaaatagagacacaaaaaacccttcaaaaactcaatgaatccaggagctggttttttgaaaggatcaacaaaattgatagaccgctagcaagactaataaagaaaaaaagagagaagaatcaaatagacacaataaaaaatgataaaggggatatcaccaccgatcccacagaaatacaaactaccatcagagaatactacaaacacctctacgcaaataaactagaaaatctagaagaaatggatacattcctcgacacatacactctcccaagactaaaccaggaagaagttgaatctctgaatagaccaataacaggctctgaaattgtggcaataatcaatagtttaccaaccaaaaagagtccaggaccagatggattcacagccgaattctaccagaggtacaaggaggaactggtaccattccttctgaaactattccaatcaatagaaaaagagggaatcctccctaactcattttatgaggccagcatcattctgataccaaagccgggcagagacacaaccaaaaaagagaattttagaccaatatccttgatgaacattgatgcaaaaatcctcaataaaatactggcaaaccgaatccagcagcacatcaaaaagcttatccaccatgatcaagtgggcttcatccctgggatgcaaggctggttcaatatacgcaaatcaataaatgtaatccagcatataaacagagccaaagacaaaaaccacatgattatctcaatagatgcagaaaaagcctttgacaaaattcaacaacccttcatgctaaaaactctcaataaattaggtattgatgggatgtatttcaaaataataagagctatctatgacaaacccacagccaatatcatactgaatgggcaaaaactggaagcattccctttgaaaactggcacaagacagggatgccctctctcaccgctcctattcaacatagtgttggaagttctggccagggcaatcaggcaggagaaggaaataaagggtattcaattaggaaaagaggaagtcaaattgtccctgtttgcagacgacatgattgtttatctagaaaaccccatcgtctcagcccaaaatctccttaagctgataagcaacttcagcaaagtctcaggatacaaaatcaatgtacaaaaatcacaagcattcttatacaccaacaacagacaaacagagagccaaatcatgggtgaactcccattcacaattgcttcaaagagaataaaatacctaggaatccaacttacaagggatgtgaaggacctcttcaaggagaactacaaaccactgctcaaggaaataaaagaggacacaaacaaatggaagaacattccatgctcatgggtaggaagaatcaatatcgtgaaaatggccatactgcccaaggtaatttacagattcaatgccatccccatcaagctaccaatgactttcttcacagaattggaaaaaactactttaaagttcatatggaaccaaaaaagagcccgcattgccaagtcaatcctaagccaaaagaacaaagctggaggcatcacactacctgacttcaaactatactacaaggctacagtaaccaaaacagcatggtactggtaccaaaacagagacatagatcaatggaacagaacagagccctcagaaataatgccgcatatctacaactatctgatctttgacaaacctgagaaaaacaagcaatggggaaaggattccctatttaataaatggtgctgggaaaactggctagccatatgtagaaagctgaaactggatcccttccttacaccttatacaaaaatcaattcaagatggattaaagatttaaacgttaaacctaaaaccataaaaaccctagaagaaaacctaggcattaccattcaggacataggcgtgggcaaggacttcatgtccaaaacaccaaaagcaatggcaacaaaagacaaaattgacaaatgggatctaattaaactaaagagcttctgcacagcaaaagaaactaccatcagagtgaacaggcaacctacaacatgggagaaaattttcgcaacctactcatctgacaaagggctaatatccagaatctacaatgaactcaaacaaatttacaagaaaaaaacaaacaaccccatcaaaaagtgggcgaaggacatgaacagacacttctcaaaagaagacatttatgcagccaaaaaacacatgaagaaatgctcatcatcactggccatcagagaaatgcaaatcaaaaccactatgagatatcatctcacaccagttagaatggcaatcattaaaaagtcaggaaacaacaggtgctggagaggatgcggagaaataggaacacttttacactgttggtgggactgtaaactagttcaaccattgtggaagtcagtgtggcgattcctcagggatctagaactagaaataccatttgacccagccatcccattactgggtatatacccaaatgagtataaatcatgctgctataaagacacatgcacacatatgtttattgcggcactattcacaatagcaaagacttggaaccaacccaaatgtccaacaatgatagactggattaagaaaatgtggcacatatacaccatggaatactatgcagccataaaaaatgatgagttcatatcctttgtagggacatggatgaaattggaaaccatctctcagtaaactatcgcaagaacaaaaaaccaaacaccgcatattctcactcataggtgggaattgaacaatgagatcacatggacacaggaaggggaatatcacactctggggactgtggtggggtcgggggaggggggagggatagcattgggagatatacctaatgctagatgacacattagtgggtgcagcgcaccagcatggcacatgtatacatatgtaactaacctgcacaatgtgcacatgtaccctaaaacttagagtataataaaaaaaaaaaaaaaaaagaagtttacggataaaagaatgagaagtagactgacattgtacttttcattaacgtgttgaatgcctaaagaatggaaggaaaataagcttaaaattttgaatctatgataaagaaaactattgattaaccatatgcatatttgacattaaaataattcataattaggactaacagatttctggcttaaaaaatctaacaattactttaagaagcaaaagacatttccagaataaagtagggggatatatagaaaagttggtaccttttttaaacagagtcttcttttgtaaggaagtagaatttattcatcaaaggagatttatgaaaagtatggtggtatagtgagtggcctcactagttttaatgattgatatttgaatatagcttagtcttataacaactccccaaataaaaatttaaaattcatttgtatccctttgattttcagtgctaaaaactagattgtgaatgtcaaggaaatatttaagttatttctgaactaatgtatttgtagagagaagaagggagtgtgcacgtgatcgagaattatgttttgaaaataaatgaatgattggctattaaaaaaatttttaagccttaaaaaaaaaaaaaaaagacactgtataaatgttagttgtttgagcatttttgtatatacgtgtatgtccacacacatatacacaacattttaaaataacatcagttattttccctcttttatgtttttattttcctaataattcataccagtgatgtaagatagtggtacccagaccccataatctaagaggaatttgttgccatttgaacaaggaatgtgttgcctcattcatattttcaaaaggatataaatacattgttgtatatctttaggggaaatatatattcagtattttaaccagagttctcactgctgtgttcccacattgttaatatcaggtagtttgcctagatgttcacagtagaagtacagggatgtagaaacatggtctttcttcccaaagaagtcatttttctttaaaatttgtgaaataaatgaattaattgagtcagcctttaacatagtaatccattttgcattattcagctttgattgaaagagacagagaaaatatgttttgtcggggggtggggagaatgggagatagagatttctcagaattaacagggtgctctatagctcaataagaggccctgtatatacagcaggatagatttgtagttagttaaggaaatcttaagtctaaaggttgtaattcccttagaattcctgtaagttaattgtttttcccccactgtaatgcatacccttgaaaggcaggaaccttctgtttatcattgtatcccaagggcctatcataagcacctggtaaccaataaatgttgaactgatatatgaaattttcctgatcttagagattaagtattatcctcatggtctaggggaataaaacatccacacgtccaaaccatagtaattctgtttccatattctgctatctatgggtttcattattttaagtattctaaacttacagagagcaagactaatactttaaaattttattttggtctatagggaaaaaaaaaggttatttgagtttggtgactgtgtccatcactttggtttaccactgaattcacagcagatactaagaagtatctgcattgttttgtttggtttggttgggtttttaaaacagggtcttgctgtgtcacccaggctggagtgcagtggcatgatcatagcccactgcaacctcaaacccagagtgaatggatcttcctgcctcagcctcccaagaagctgggacttcaggaatgcaccatttgtgcctggctaatttttatttttttattttttgtagacatgggatctcactgtattgcccaggctggtcttgaactcttagcctcaggtgaccctcctgcctctgtctcctgagtagctgcaatcacttaatcctttaatagtcccaccaatctattattatctctgtttgacaacttatgaaactgaggtcagatagggcaaatgcagtcatgcaccatataacaacgtgtcagtcaacaacagaccacatatatagtggagatccaataaattataataacatatttttacagtacttttctgtatttagacacacaaatacttgccattatgttacagtactgtactacataggcaactatgctattcagtacagtaacatgctgtagaggtttgtagcctaggagcaataggctataccatagagcctaggtgtatagcagactgtacaatctaggtttttgtaagtatactctatgaagtttgcacagcaacgagatcacttaacaatacatttctcagaacgtatgcccattgttaagcaaagcgagactgtaattgacctaaggtcacacagttaacaagtagtgaggttttaaactaaggcctttgaccagtgctcttgatcattacagagtggtaccaacatggtagcataagctttaagaggagggaaaacttggttcccgtggctttatcagggaagacttcttagaggaggtagcagttaagctagcccttaaagaataagtcttatcttgaactgaatgtatgctagagtcagaattatagaggattagattcagaataaaaggccatctgtttcaagttcctaatttgcagaggagaaaactgggatctgtgaggttaaataacttgttgtaggacatatggctaattaagtggcattagaactgttctcttccctcctctatcctgtgttattccctgtccccctccgttaatgcacactagctcatgttaagtctgttttttcatcaacactttctaataagagttcctaaaaacattttacagcttgaaagtggaggctttcttgtgtatctatgtatggtgatgaggttaaaccaggaaagggtcagggcaggcatggaaggagatactagagatacgtggagacatggagagacagaccttttctatctgttttttgtttttttttcctagcattttactttattgttacatctgtttccttccataagtatagataattgagtgttgagagaaaggggacaaatgaaattctaatgagaaaaaaatgatttaaaattccacaaaatctatggaatttcagcctcttaagtaacctgggatgtttttaactttcactaatgtttattagccagtgtccttcctgccacccacctacaaggatgtctcaaggatgaaatgaggtcatatatgtgaatacacacttaggatacaactgccatgtattggcagtcttgtctgttccctgggcctacactgttccttgcctcaaaatgtagtactatcaggtagtgttgatgtttcattagccaagtggttatatcagatttatgtactgctaaacaattgatctgggacttgggtaaatactcattggaaaaacatttgttgtattctgagtgctccctgttaatcttctcctcctcagatagcaagctagatctgggacttaaggtggatttttttccttatttttttttcctttgttttacccaatgattgaaaatataaaactaaacctttttcagtaaagtctgaatcagcagatacttacattactttggcataggctttttatagactagctagaagaatacagtaattagcatatgcatttcctcattaaaatgtcattagtgaaggctttgttcttttaaggtccttcaaataaggtttattgcattgcattccatcactaatattttaccaggagtcagatatcttacttaggtgtgttgaagcaagggttactttggactttctatagggtaatgacctaagagcagacctggacacacataaatctctatgcttacattgggtgggccctactttatgtactagtaataattaccagtctcttctcacactgtccattcagaatcctttggatatatagacatttagcaaacctagacttgtttgaaagaataaactgttatctgcactaaactgttttccttggttatcttggtaggatttgatttgaaaaaaatgtatgaagaattagaagaaaagaaatttataatgtactataatcatttgagatacagtattatgcaggagtaagaatacaggctttagaatcagaccattgaggattcaaattcttgcttcatcatttactggttgtgtaactttgtgatacttagcctttataaacctcaattgtctgaatgtaatacggaaatatgagtggtccataccttataggaatgtttgagaattcagttagattatgcatgtaaagtatttagcactgctgcctggaatatatgatctattattacattaccggctgggcatggtggctcacgcctgtattcccagcactttgggaggccgaggagggtggatcacctgagctcaagggtttgagaccagcctgaccaacatggtgaaaccccatctctactaaatataaaaaattagccgggcatggtggtgcatgcctgtaatcccagatacttgggaggctgaggcaggagaatcgcttgaacccaggaggcagaggttgtagggagtcgagattgcgccattgcactccagcctgggcaacaagagtgaaactccatctcaaaaaaaaaaaaaaaaaaaaaaaccaacaaaaaattatctttataatagaaaaaaggagtgtgtgtattttcatatgtattgtatctgctttctacacatctttgacttaagaaatcctaacatgaaatttcaaaacaagtaagaaggtatttaaggagtggtcattaatatcattaattggcttaaggcaaactttctttaaaaagtcacacacatggtgtattcaaaataaactacttcacttaatcattttaacatttctgctatgcagcgtgactagcaacttgaaggagcaagttaggaaatgcctttgatgaccccatgacatcactatgttattaaataactggaaataaactgaaaattatgggatagtctttaaggctttcatgacatttcagcattttagggttgcagtattccaaggacttttagagtaattgcatgtcatcctttgtgtgttgtgggcaaatttgggttagctaaaagttggtcagttaaaaaaaatttatattaagcatctactctgagccaggcattgttcttttttgctgtgaatatagtgctgaacaagaacagaagccttgctgtcaaagacgtaacattccagggtaagaaaatagataactcataaagaaggaaatgattaattcagatacttgtgaggctatggagaagataacctaggctaacgtgatagagatgggtggtgaggatgtgagttaaggggaggccttttgcaggttgttgggaggagatgcaagtgttccaagcagaagaaagaagaagtacaaagtccctgatacactaacaatcttggtgtgttcaagggacaggaaaaaggccggtgtggctggaatttggtgttcaaagcaagagaggagagataaaggaagatgagtcatgcagagccttttgaaggctgtgggtaaaatgtatgttatacggaacttagttctaaatctagttgcagtggattaacctggagagtgatgcaaactgagttttactctggaaaaacactgtgactgttgtgtggagaatatgctcccaagtgtagaaactagatcaccttgcatgggccaagagagatggtggtagtttaagactaggattgtagcagtgaaatgtaaagtggttgcattcggacatattttggatagagatttgacaggaggtaggtggattggacatgggatgtaaagtaaaaagaggaagcaaggatgacttccaggagtttagcttgagcagctggatggctgatatcatgtgtaggcatagggaaaggttgtatgaggaagaatttatagggtgtgagggtgtgaagcagggaataattttgttttgacatgttatgaaagaaatgccaattgacggctaagaaaagatgtcatctgggcaggtaaagaatctaggagattgggaaaatgtccagcgtggaggtataaatgtgaaaaccatcagcatatgggattgaaagctatggggctgtttggattccctaggaagagaatataaataaagaagggggctgagaacagagtctcatttataatatcctgataaggaagaagacccagtgaaggagatgaagaaggagaagccagtgatgtaacacaagcatggatcatggcaaaagagaaaaaggtgtttcataaacaaggatgcttggtatggccacctgtgtcagtactgtgaagttgaatatgatcaggacaaataatattaattggggctttatatttctcctttactacaaccgattaatgaaacaaaaaattaacctagcacccaaggtgtttcttatagttggtctctccagtctgttttagtatcatttgttagttatttccccaaactaatgtttagcttctttctccaaaaagaatatattttttttcctggttctgcttgttggaatccccccctccaccatgatataaaagtaatggggcttattgtaagaaaacagaaaatacaagaaaataagggacaagatttttaaaaatggattcaattctgggaacaacaaatgacattggggtataggaattaaaccgtgtgcattctgtctctcaccccaattttatagtcatttgctggggaccttttctccccagggtacttgcatagcttttgtcaagaataacccttctcacttccccacctccttcttctacatgcagatgcagcacttttctgggtaaagttttagcaatgccttccttctaaaatgaaagcattttctcctcacgattagcatctgtttatagaatagttcgtattttcgtaattagatcctgcatagaaatgcaaaggctgctgtgtaaaaggataatgaatctttattgcacagttgaaatcagatttgtgcaaaaggcactttgaaaacagtaataagcagagacatgtattaaatcacccagataaggcacccactttatattttctatttataaatggaaattatgactacccagtggattccatatgacatttcctattaccagcaaaggtttttagctttgaccataaaagttatctaaattcaaaagcctctgtggattcatggctctaagaatacttctggaaggggccaagacagagtggaaagggtcctttgtctttttcttttgtgtgtgtatgcactctgcagaggggaaggttagcaagtggtagaagaaagaagccatttgaaataaccatgataagatctaatcaggaaacccagtgtccattacacacatgtggtaacattttaagactcttctggttgggctccttgagaaccaagctcgtgttcttataagctcatccttatattttcccattgtatgcatcgttgcatggcaaacacaggatttattcccaagctaaacctgtctcttggggtttcttatcttttacctccttggtgagcctcgggaagctagagcattgctctatggagaaaggagggtggcattgggaggaagggtaggaaaaacattattgggaagcagagaaagtcaatgtcaaatgaactgccaaggatgaatattatggctgctgggagcctcggagagtatcgtgtgtcttatgtgtctatttcacagtcggtgcttcatgtgagatggcagtctcgcctggaccgtgcttagtatcgatttactctcaggcatgccagaccattttagcattgctgaaggaaggaaatcctatgtatttccccttataaacagacatatcaaaagtgtatcttttaaacctttttctttctgtcttcttactgttctttctgtcttactgtaactcctcctccctccctgatttaaaagaatttttttttttttttttaaaagaaaaaagactttctggccgggcgcggtggttcacgcctataatcccagcactttgggaggcagaagcgggcggatcacgaggtcaggagattaagaccatcctgattaacatggtgaaaccccgtctctactaaaaatacaaaaaattagccggatgtggtggtgggcgcctgtagtcccagctactcggaaggctgaggcaggagaatggcgtcaacctgggaggcggaggttgcagtgagccgagatcgcgccactgcactccagcctgggtgacagagcgagactctgtctcaaagaaaaaaaaagaaaaaaagaaaaaagactttcttattaagagagcattatacaggccaggcgcggtggctcatgcctgtaatctcagcactttgggaggccgaggcaggtggatcacgaggtcaggagatcgagaccatcctggctaacatggtgaaatcccgtctctactaaaaatacaaaaaattagcggggcgtgatggcgggcgtctgtagtcccagctactcgggcggctgaggcaggagaatggagtgagcctgggaggcggagcttgcagcgagctgagatctcaccactgcactccagcctgggcaacagagcgagactccgtctcaaagagagagagagacagcattatacagagaacaaattgagtagacttttttagaatgatagagtgtcagtaactactcatacctgtgggggaaagaaaaaggcttcaaactttgcacacttctagcccttccatgaaaatagaaggaccttatttgaggctagttttgtggtggtgggatctgagcactgctgagtgttaacaaaagggaataaattgatgccaaatttagagaccaaaaatgccatcattttcacctgcctgaactcttctgttgttttccctagttgctgccttgcgctttttccgcagtacagggagagaaatcagttgtctggctgtctaaactcacggcatctgcttagcagtttcaccagctcatagttgggactcatccctctgtcagaatcctttgctccattagaagggagactgggaccacgttcctgaattgatttgcatacttctacgttacctagctcagacaacatatggccatgtggagcacttggatttatttctgtttcctcaaattaaattcctaaaaaattggataactccacagtttgtttggtgttacaaaaaattttagttccttttttggtcggcaaagcaacacaattttggcattaaaaaaaaatctctggattactttaaaaagagtgttgatttgatttgcttcccctcttctcttacccctttcaggaaaaaaaaaaatgtatgttgaatcttaaaacactgcatcatgttgcaaaatgtccatttaggcacactgaatagaaagtatcatcgagtcatttttattcttgtaattcagtaatcttgtatcttttgcctttttctttttccttaatgttaattgtgtaactaaatgtctcaaacttgggacttttcactttacacatccatgtgtaaaaatacatagatacatacagtcagatagaagaaataagactcagtgttaatagatcagtggttggggtgggggaactatacttaacaatagtatgttgtacatttcacagtagccaaaagagaacaattcaaatgttcttaacataaagaaaagataaatatatcaggtgataggcattctaattactctgatttgatcttcccacattatataaatgtatcaaattatcacgtactccccattaataatactgtatatcaacgaatttttttaaaaaaagaaatagatatcatacaatgaataactggattaatgtgaaatgatagaaaaagttaccattttaggctggatgtggtgacccacgcctgtaataccagtactttgtgagtctgaggcagtaggattgcttgaggccaggagtttgagaccagcctggttaacgatacaagaccccctttctaaaaaaaaaaaaaaaaaagccaagtgcagcagcatatgcctgtagtcccaactactgagggcatagaggtaggaggatcatggatcactggatcacttgaggagtttgaagttgcaggaagctatgatcctatcactgcactccagccgaggtgacagagcagcaagaccctgtctcaaaaaaaaaaaaaaaagttactattttaaatgcacttcaactttgaacagtactaatgtatgaaaatcatcttgtcttctttaggaaattctttgttgcctaaattagggataggtatcatacactggaatgagctctaaaacgatggctcttgctatgggaaacagttttatttgggtactcatgtcttctctcttaagggatcttaggaagaggctacatggtaaagaagaaatagcatgggctttagagtcaagaggcctgagttttaattctcaggctttatttgtccttctgcagtggccttagcaaatattataacctccctaaagttagagttattgtaattgtcgtacatacaatgttatcataagaaaacagtgagataacagatatcaaagtacctgggcagtgtttgacacttggtggtctataaatataaatatcatttcattcctgaaggtaactgcagcacttttgaaaggctggtttgatgctaacacaggaggattagacctaattatatatttctaaggtcttagaaatggggagctaggtttttcagacaatatactgtattttgtttttcctcccttttgctttaaaacagaaggcaatttgtttcaaactctgtgctccaaactggtggcttaattaggcaagtttattgactgtcacagaggctgtggttaaaaactggcaaatatcatgtgactatattagtatctctgagcaaataaagggaaaagacaggattccacccaaccacatttttttctttctcttttctcccaagctcattcttgcactgcaacattccacttataatctgttaattaaatcatttcactccattttatataatttttaatttagcattcattttcaacttagcttttggcttcatttactgataataaacagtgttgcatacaacacatgttccacaaaacactcagtcacacacatacagatgccaataattttttccagtatgtcaggcatattaaaattaaaggcagcatctcccctcaccctttccattactgaatgtgcaccctgtttgaataatacatactccccgacagccagcagtggtctaatgtgtaaaaattatgtgtagcgtgtcactagtacctttttttaaattcgtggttttctcagacatgctctgtggaaggtttctggaatggtcacttcgataccttggatctgtatatttggcttaatgtatacaaacagtaatattttctagacttattactttatgggtttatagctatgtgatagttattgagaaagaaaactctagtgtagcattcaaattacttttcttgtagcttattttttgaatcatagtctgaattctaaatatatgaatatctttaaccgtagatgatatccagaagtttccaagactgcaagctcaggggtttatggaccacttttaaaagatagatactaagccaggcacagtggctcacgccagtaatgccagcactttgagcaagcaagatggactgatcccttgaggccaggagttcaagactagcctgggcaacatactgagaccccgtctctacaaaaagtacaaaaattagctaggtgcggtgacatcttttagtcctagctactcaggaggctgagaggagaatcactggagtccaggagtttgaggctgcagtgaggtatgatcatgccactgcagtccagcctgggtaacagagtaagaccctttctctaaagaaaataaaaataaaacatagatacctgtgttgttgttatagctgttcatatccttagaattaatttaccttgtctgctcctgcatattatttgtctcctcataattagcaaagttccacagggccagatatcaccaaatatgaatagtagattttattctaaggtcagtgagaactgaagaatgttaggggctgactcaatcagatttgtttgtatttatatttggaaaaatattactctccggagaatgttttggaatgtttggcagggtggttggagagacatactacaggaaagaaatgatggtaacttagttggcagtgggaaaagtgagtagtgaattactcagagctctttgggggtgaaatggactggacttatatcagttgaacttgagaaaaggagaagcatcaaggatgatgtaacttttaggtttctggcttgagcagttgtgtaggtggtagtaatttttcatggtgaagatgatgaaatactttttgtacctgtctcatgattgctttctgtacatcaaggtcagaggtcataagctcataaaatgcttggtattagaattcttacataaaggatgtcttctgttttagtttagtaatacaatttggcttaaatcacagactttctctaatctttgttttgattgtcatctgccgagagcttaagacagcaactcacaggttggcccattgagaatctgacaaatgaaaaattataaaaaaaattcagaatccctatattgtagcccaactttctttagcacttctatccttgaatgctagggcagtgttgtatactgtgaagatctttgtagatttttctactctgtaacattttaatagttccattttggggtattacagctgttcagtcctccccatacctcaaattatagttagtctccttcaagtcccaaatttccagtgtacatatgtttcatcttatgtttaatctggacagagtgttggaacgaaatatggaccctgaaaggtgtatgacgggcttgaagtctcagccctactacttgcttaatgtttgatttgctaatccaaacaattataatctgttaattaaatcatttcactccatttcatataatttttaatttagcattcattttcaacttagcagatgctcctggtgtcccacccatacccctctttcccttccactttagttcacaatggccctccttcctcccgctaggccttatattcattcatcttcagggtttgtctagtcaatgaattctgctttgcctaaggagtaggcaggaagtaggtgaaatgaactgctacctgagcaacccacagtcaatgactaatgagagttgttgtataaatacaccagcttccttgcttcttaagtgggataactttgaggtatacattctacactggcttccggagtcctcccagtggcatttgcttctagttgcccatagtggtagttggctgaataattacataccctttattccctgtctgctgtcatgatcttactttcccagtctcctgctattgtttacctcctaaataaacttctcattgtctgcttctgggagaaccccagactaagacaaccactgcgaacattggtttcctcatctttatttattattactgttttttgagacagaatcttgcgctgtcacccaggctggagtgcagtggcacgatctcagctcactgtgacctccacctcccaggttcaagcaattttcgtgtttctgtgggacgtcttacataggcgtattttttttttccggctactaccactatttggactaattattctgaaattttacttgccaagtttcagcttttattagcaagaaaaaatgttatgtccacagtttagaataaaatcacagagaagaaaagttggatgaggatattggtttgcagtcttctgtctgtgtttctgtcttctgagcattcacagatgttcctatccttctttccactggtgttcacataacctgggatcttgtgttgtatgcagtcactctcaaggtaggaactggaagataaagtatgtgggtgacatggactacttagaaggaaactgaagtttacatgttgagcccaattagaagcagctgaagagaggagagaaaaaattaactgagaagtttaataggcacttagagcatggcgaataaagctgagtggcacccacttttcatttcctagttcattctagttgtgcttttttaactgcaaagactaaaaaacgaaagcctttatttcccagtctgtcttgcagctaggattctgggtgtgaatcaggtatatttgctcaagatttggaaggtcgacatgaggtaaaggttattcatcttcagctttagctctttttatctgattagccagggcaggagaagtatgatttttctgtggtgatgtttcagttttcaactcagcttcctagatgttgaaaggcagttatgatgcgatttcctgatcccaggttgcagcttcgctagtgcatttgtagctgggctgctgcaacaatggacttctgtttatggcagaagaaaggccatactttaaccttgtctagtgattttttgtaagaggttggttctctgtattaaatcacttcctacagaaaatttcttaagtgttttctggtttttgtttgtttgtttgtttgtttttaccagaaccctaactgatatagatggttgaagcaaactttatgctgtaaaggtccagacccagataaaaacgagagacaggaaagatgcagcaagatggtctgcaggcctgcccatgcatacactactccatgatctggtgtctgcaagaaaacaaagcaactgctcattaagtaacagggcagctaatgctttagctcttgaggccctgtgtcatataacttctaattcctctaattcatccaccaagggggcagtgaggcagttctctgtttgaatgctacatcgtttctgacttagtgctttgaagtggatgacatcttacttttttttcttatcttagagataaggtgaacagaggaaaaggagaatgatttgcccaacctttggctaaaggagaaaggaaagatttagagtccagtgcttctgacttccctctgatgcggtaacaaggataatatgagtatctaatatgctggggcacagtaagatggctctgaaggtatgcacagtagagaaagccatggtccttgccctcagggtctgtgatcggccactgaggcacacatttccacttcctgtgttccattaattatgctaattttccaacaagccccagccccacctctgtcaattatttttgtctcagccttctaattacaacattatatgaccattcagactggtactaattaaatcattacttaattcacaaagtgtgcgataatgctaatgcttcttgtcagctgaaattacaacatggcacctactttcttcattcttggtagatggggccagggggttgctcttttaccaaacatcttttgcttaccctctgatagccacctgaccatcagccagaacctaccttcttccagaactgggaaaacagtgcagtagacctagcgatatgtacctgtaattcatcactatcatatgaaatcatcatcccagttttgtttgtggagtaaatcttgatactcaagaaaaaaaaatagtagtaagatttagagtactatttgctacattttttgtcatttgttctgcgtattatttttaacagagtaaacagtagcttgtctctttttctcatttctaaaacagatttgttttccactcaattagacttgtgatcacgagaacacaaagtagtatttttctccttctggagagagacataccgtatgatgggcaaattgtcaggaataattataccaaatgatggaataaaatccaatggaaaacatctctctcattgctagtgatacatttttatttaagacacaatgagcatcaagcacatttatgacaaggtgaaattgacaagtggccctctgccatgattttatttttaattgctagtaaactaattagccagaacaacatgttgtataatccacaaaactgtcgctcatgcgttctccaataaaagcaagatatatgatgtggaaaagttctctaagagctagccaaaaaaaaaattatttcagaattttgagtgtatagacatcacagtaaaagatgtctcctcaccagtggaagaacatttgtatataacatttgttttgagatctgaacagaaattaaggacaaacagtaaatttttttcttttccttttttttttttttttgagagagagtctcgctctgttgcctaggctggagtgcagtggcatgatcttggctcactgcagcctctgcctcccgggttcaagcgattctcctaccgcagcctctcaaatagctgggattacaggtgcttaccaccatacccagctaatttttgtatttttagtagagacagggtttcaccacattggtcaggctgatctcgaactcctgacctcttgatccacccgcctcggcctcccaaagtgctgggattacaggtgtgagccactgtacccagcctgttttttccctttttaagatcaaagtatgcatcaaaatagccaaccactttcttacatgtaattaagttttatgtagttgagtcacattaagtctaagacatacattctaggactaagactttacagtcattcagtagttacttatttgtgcaaggcttggcaaccttttcctttaaagggacagataatacatatttttgtctttgtgggctgttcagtctttgccacaaccactcagctctgatgtagagcagccgcagtcatagataacgcaaaaataaatgtggcagtgttccaataaaactttatttatggacacaaaaatttgattttatgtaatttttatttgtcacaaaagataattctttgatttttttcaatcatttaaaaatataaaagccattcttagctcatgggttatacaaaaggcaggggtgtggatttggcctacaggctgtagttgccaacctttcctctgtacctgctgcatgccagcgtcactcctcattctttagtatcagacgtgtgttaggcagggtgctaagcatcgagggatattcagagatagagcaaagtcccttccctgatgaagcttacagttaagctagaaaggaaccatagatgggacagagacacataatattagatgttaaatggtgtccctctgtgacaaaagccaccattgctttacaagtttaagagagagggaagtcacttcagctgatttaggtgatctgctaagtaagacatgacctggctagctacggatgcatggaaatgatgggatatcagctggatcctgaagaaaaaggctgtggacctttgaaaaggtaacagggcataatgcctccttttagaggaagggggaactgaggatggcgaaaatgtcaaccatgagtcacttattcctatcatttttcccccaattctttctttcatgtcttctcatgaaaatttcaaacatatagcagttttaaagaatgttacagttaatacccaaatactcaccatatagattctaccattactattttgctatactgttttattgtatatctatcctatcctcttttgttttagaattctggtctcgctctgtcacccaggctggagtgcagtggtcactacagcctgcaactgctgggctctgcctcctgagtggccaggaccctatgtgtgtttcaccaccatgtttggctaattgtaaataatgttttgtagagatgaagtctcactatgttgcccagagtggtctcaaactcctgggctcaagctgtccccctgtctcagcctcctgcattgttgggattacaggcatgagccaccacacctggctgctttattatatatctgtccttctgtctattcattaatccattttatttttggtttattttaaattaaatttcagacatcaagatacattttcataaatatttaagcatgcatatcattaactaaaatttaatgttggcttatagtttttcttcttttggtgtaaaatttatatacaattaatcgtaccaacattaaatgtacattctctgagatttggaaaggctgatccttttgtagcctaaattggaagatacataaagttttcatcacctcaggaagttccttctgtcagtccttgcccccagcctacccctggaggaaccactactctaattttctctgctttaggttagtttgcctgttctagaatttcagagaaatggaatcatacagaacctatcattcggtgactcacgcctgtattcccagtactttgggaggctgaggtgggcagatcacctgaggtcaggagtttgaggccagcttggccaacatggcgaaacctcgcctctactaaaaatataaaaattagccgagcgtggtggtgggcatctgtaatcccagctactcgggaggctgaggccggagaattacttgaacctgggaggcagggattgcagtgagccgaaatcatgccattgcactccagcctaggtgacaagagcagaactgtgtctcaaaaaaataataataaataaagaatctatcatttgggtttggctttttatcatcatatattttgtctttacttgcttagtatctagcaagaatataaatgcaattattttgccagagaaaagtatatgtttgattaaggaaaacataaaatacaactttgtttaaatatctgtatgtatattcttaaattattgtaaaattaaattacctatggattaaatttttcacattaacattacttagtctattatgctccagcattttacatatttatgttatttaattaaaatctttgcagtagatatttcccattttgaagaagaggaaactaagacagcgaataaaataataaacaatattatttcttacctcttactgttgccacttcagtgtcagggaggaagagggatagcaaatgtaggaagggtgtttgcaaggtgagtgaaggtgaagctgctttgttacaagttttcttatcaagaaatggatagaacataggagtagagaagttcaataggaacatgcaaaatttgtctattgtaaaagaaggaagaaaactggagaatttaaggactattttttaacatctatgattaaaatattatgaaacaatatctttttaaaaagtgatatttttcctctagtataacacaagttgttagaaactaaggaatcaccctatcttctttagtaaaagcctacaactggtagagtttttttttttttaaggatctcaagatacttcatgaacctcaaaagactttaagttctctgcaatgttaggaaatgacttcatgaatatcacagttcaaggttctgctactgcttttagaagcccccaaagtgtgaagacatctagtacagtatacagtaagaggagaactggcttttattgctcacaataggaatgttcccatctatctgtttgcaaaccaactcataaaatatttgaatattcttcactctgctttatgataatatttcttggcttggaaatttgctttttttttttttttttgagacaaagtctcgccctgtcacccaggctggagtgcaatggcgtgatctcagctcactgcaacctctgcctcttgggttcaggcggttctcctgcctcagtctcctgagtagctgggattacaggtgcccgccaccacacccggctaattttttgtatttttagtagagacggggtttcaccatgttggccaggctggtcttgaattcctaaccttgtgatcctcctgccttggcctcccaaagtgctgtgattacaggtgtgagccactgcgcctggctgaaatttgcattttcattaatagatcatccttatttaacaatgaacttcctatgtgtttgtgacacatggaaaataagtaggcagcatttaatgtcatttgggaagcagtgcttatagtagttcggtttacattcctcatacagccatgtgccgtatagtgatgtttccatcaatgactgcatatgcaacagagtcccacgagattataatggagctgaaaaattcctattgcctcatgacatcatagcctggtaaggttatagtgcaacaaattactctcacttctgtgctgatgctggtgtaaacaaacctactgcgctgccagttgtataaaagtacagcatatacagttatatacggtatataatacttgatagtaaaagactatgttactggtttatgtatttactatactgtaattttacacttattttagtgtagtccttctactagttaaaaagaaaaaagttaactttagaacatctcaggcaggttcttcaggaagtatttcagaagaggcattgttatcataggggatggtagctccatgcatgttattgcccctgaagaccttgcagtgtgacaagatgtgcagctggaagacagtgttattgatgatcctgttcctgtgtagtcctcggctagtgtgcatgtttgtatctttgtttttttttttttttggttggtttgtttcttagaaggggtcttgctattttgcccaggctagtcttgaactcctgggctcagtggtcctcttacctcagcctcccaagtatctgggattacccacatgcaccactgcacctgtctgtgtcatagtttttaacaaaaacatttataaagtaggccatgtgcagtggctcacgcctgtaatcccaacattttaagaggctgaggcaggtggatcacttgagcccaggagttcaagatcagcctgtgcaatgtggtgaaatcttgtctctacaaaaaatacaaaaattaagtgggcatgatggtgtgtgcctgtagactcagctactctggaagctgaggtgtgaggatcacttgagctcaggaagtagaggctgcagtgaactgagatagtgccactgctatccagagtgaagccctgtctcaaagtataatacaatacaatacagtacagtacaatacaatacaatacaatacaatacaatacaatacaatacaatacaatacaatacaatacaatacaatataataccatacaatacaatttaataaaagaaaggttatagaatatggatataaaggaagaaagtatttttatacagctgtacatttttaagctaaatgttattaaaaaggattcaaaatttgaacaatatataaagtaaaaaacattacagtaggctaaggttaatttgttattgaagaaagaaatttttaaataattttagtgtaaccaacatgtacaatgtttataacatctacagtagtatacaataatgtcctaggccttcacattcatgcactgctcactcactcactcacctagagctacttccagtcctgtaagctccattcatggtaagtgccctatacaggtgtaccattttttaatcttttatactatatttttattacgtcttttctgagtttagatatgtttagatacacaaatacttgccatcaggttacagttgcctacagtattcagtacagtcacatgcaagtttatagcctaggagcaataggttatgctatgttgcctaggtgtatagtaggctataccatttaggtttgtcgaagtgtattctatgagttcatacaatgacagaatcatctaatgacacatttctcagaacatattcccatcgttaagcaacacatgactgtgcttagtcttctacacaggcttagtcttccttgttaattgaaactctatgtttcttctcagtttaagaagcttatttcaggactaattttcccccttttagaataagtttcccacatcacttggttacatgacaaaacaagttaaatcactgtccctttttgggtttaatatgtccagatgcaaattaaagaaataaaatcccttagatttttctgtatcttgtctcccttcctcattttctgcagaacagtttttaaaagttaatttaggaaatctccaaaatattagattagcatgacttcagagctataaggttcctgaaaagtttatgtagaaatgttgtttttagtgctttaatttctcttatagcatcttgatgggtagtcattctgcctaaaggagaactgaactcatcctgtgtcccaggagctttgtcatatgaaaagttgtaatccattctggtgcttcagatgttgaaggcccagtgaaattctacaagatggctgccacttgagctttggccttgcaagtggttaggaagatgttggtcctttaatctctgtacaggggttcagaagtagttgatagtttactaatgaaaaatgttatatgtagcaaaacacaagcaaaaaaatcaaaaacactgatgacttatataaattattaacttaaggaagattatggtacttgaaaaattattttacaaaaaaagattgtattaggaattttttctgctcttttttctcaagttagtaccaatgtaacatggctgtgttcatgtaatttcttttctcaatttggttcaagatttgtgtagctcccagtggtagattttgcggttgtattgcatgattaaagtgtccatcaaaatcttacagttggtaaacagtattaaaaatccatctccagcctctgtaaactgtacagagagctatgaatactagaagaaatggaagtattttaattaacccaagtaggactaatcaaagcagagcaaccagtttattcaattgaacatgtaaatgtctattcattcttgacatggcagaacatttatgtcatctattaaaagctattctgttgcttgtatgattataagctattgttcaacggggaactgaatcttgtaaaggcttccccaccccactttttgtttttttgagagggagtctcactctgtcacccagtctggagtacagtagagcaatcttggctcactgcaagctccacctcccaggttcatgccattctcttgcctcagcctcagcctcccaagtagctgggactacaggcgcccaccaccatgcccggctaattttttttttttttttttgtattttcagtagagatggggtttcactgtgttactcaggatggtctcaatctcctgaccttgtgatccgccctccttggcctgctgaagtgctgggattagagtcgtgagccaccatacctggcccccccttttaataattacatattacagattattttttaacatgctttttgctgtattcaggccacttcagataacccagcttcttgcatgaaagaatacagacttgggtaacttggttcagctaccctgccatcacctctttccttcaaagggttttctcttcttcatttcttcataataattcttagtaaatatctactacatgctgggtacatgtattctaagcatgttatatgcagtatatcatttaatttttgcaactatattgttattttttccattgtatgatgaagacatggaggaagagtgttgcatagtgctgtaagtggtagaaataggatatgaacacaaatctcagaagatccattgtgttgaaatgaatttgagttgtaccaaaggtgattgacattagacaccaggaagaaatttttgaaatgagtggatgctctaaggagccttttaagtgagtacagctaaaaggggttggggtgaaggtagtttcctgggattttttattaccattaagacacgtaaaaacagtttgtataaaatcccatttttcatgaattagttacattcttaccttgagccaggaagttaaactagatggctgtctgaagacccgggtaatacatttaatacagtcttatatgtgtataaaaagtggaaacaatgattcttttaacttttaaatatgaatttttattgcaacaacaattagaaaatataaataatacttacacccctgccattctaatgtaacacttagttttgggcctacttttttctggtcacttttctcatgcatttaaaaaaaaaaaaacaacctttttaaaggttttaaaaacgtttcttaaaatgtagtgtattatatttatgcccaaaaatctatccatgttaagcatataattcaatgagttttagtaaatttgcagagatttgtaaccatcaccacaatatgatacagaacatttgcatcattccagaaaggttcatgagcagtctctcttcttctccattctttgatttcttaaggtggaagtgtctgttactggtttactgtttcttcctttccaacataggtgtttatggaacttctttagctgaagtcatgaaaatttgtatattctatttttatttctattccgttcaaaatatcttctgatcgctcatgtgattcattctcttaactcattggctatttagaagtctattgacatatttcaaaatatttgtgaatttcccagattttcttgttgtttgtttctaatttaattagcaatacagaaaatatactttatgtgatattagtcattttaaatttatagatagttatggcctagcatatgatctattttgatgatgtaccatgtgtgcttaaaaggagtatgtactatactcatttggggtggagtgttcttaggtcagtttgtttgatagtgttggtcaagtctactatattcttgttggttttctatctaggtgtcctgtttattatttagagtggtatatcacagtctccagttatttttgcattgtttgtgtctccctttagttccgttagattttgctccatctgtttcggggtttgtagttaggtatatccatgtatatcattgtatcttcttggtgggtagacccttttatcattataaaatctctttgtctctagtaacagttttgctttaaagtctgttttgtcggacagtattctctctcccctttattattaaactacatttaatttgtattaaactacatttattgttcacatactgtttttcaatcttttttaaacttatttttgcatttgtatgtaaaatgtatcgcttttagaaagcatatcattgggtctcttttgaaaaaaatccagtctaacaatctcttttttttgaattttaaatttatttatagttaatattattattgatttgattggatttatgtctccattttgattttcatctttttttgttcagttgattttcctttactgcttcttttgtaactaaataggtgtgttttagtgtatcatttttattacttagttcatttttgctctatgaaaatatttttttctgaatgggttagggtttatacatgcattctaccttaacacagtctattttagtttaatactgactttgtattaaactttgtcagtttaataatgactttgtattaaagtctgtgcagtagtatgcacaaactttgcttcactatagatccatgtcaccatcttttatagctattattatcacatacatctatatatcttatatacccaacaatgcagtattgtaattattgctttgtataacctatgcttaaagaagttaagacaaagacaagaaaatagaaaaatgtatgtatgatttctttcaacatataaaaacctatatgcttactgtttccattactcttcattttttaaatgtggaattgatttatggcttggtagcatttctttggcacacataactatattctttctctctttctttgtgctactattattatatatattaatctttctatattatatgtcctacaacacaattttacaagtactgatttatgtagctcttttttaaatcgttagagacaagaaaagacaaaaattatatagcctcctatagttacctacatagttacctttaacaatgtttatttttcttcatgtggatttgaattaaggtctgttgtcattttgtttaatcctaatgaactttatgttttgtaaagcaggtgtgctaacagtgaattctttcagtctttaataggggatttcttaattttgccttcattttgaggaatatttttgctagatacagaaattttggttgacatctatttgtttctttgagcacttgaagacatcctcccactgtcttctgccttccattatttctgattggaagttggctgttcatcttattttgggtgccttgtacatagtgagtcatttttacccttgatactttctagatctcctctttttctttgcctttcaacagttatatatgaaatgtgtagatgtggatctctttgtgtttatcctacttagaattatttgataattttggaagtttagattaatgtttttcattaaattgggggaggtttttaccattatttcttcaaatactttttcagaacctttttctcctcttcttggaatctccattatgtgtgtgtttgttatatttgaggtgtgctacaggtctgttatgttctgtttattttcttcattttttccccctgttcttcagatttacaacctggatcaatctgtgttgaaatgcactgattctttcttctgccgttcaaatctcctggtgaggttctctagtgaattttttatttgttactgtactttcagatttcagaatgtccaattggttctatttaagaatttctacccttttattgctattctctatttgatgaattatgacatcatgcttcccattaaatctccaaactttttcggaaggggatctttgaatgtgtttataacagctgatttgaagtctttttctgttgagtccatcatgtaggctccctcagagatagtatctattgacttttttttccttttggaatggtaaaattttaattttttgcatgcctaatatttttgctgaaaactgaacattttagataatatattgtagcaactgtataatctgatttccccatctcttccctcacacatacctagagttaatggttgtttcttttttgttttttgtttttgcttgttttgggtttattactttagtttcttactggaatggttctgtgcagcatgtttccctcataatgtgtggctgctgttgtctctactccattgagtttgccaccacccttaccacttatataagcctagctttctagggaccacccctgaaatcaaaatagttgagtgctcagttaaagattggctagagattgtatctaaacacttagaacccctaaatcactgccttctgcttttatgatggatccataaatgatttggggaatgaatcagcagtcagcctatttaccagtctggcccaaatcttaatttttgtgttgtaaggcctcatgctcagcagaaataagtagcttactaaggctttctgcaggctctctgagcaagtgtgcagctttgtgcatatgcacagctttccaggccatcagagataagtaggatcgcatcaatgccctctttcagttcctggatctgcctattaattttctgactggcctactggtttgttgcttgcttcagtcagttatgagatttcagggtagctgcagtgttgtcctttcctgattgtttgcattaagatcactattgtttttgacaataccctttgtcatagaattttccacataaaatcagtcatttctaggatcagagccttcatcttcacagcacacccaccccgacagcacttctgcatcaggaagcaggggtggaactagggagtgggagtagcaccgcactaaagtgctatagactctcactgttgtcaatgaggttcggtgagttttcttgaagaaacacttctcagtttattgcatgcctttggtcaatttccagtgtcctttagagattgtttttgacaattttgttctgtttcattgtttatttttgtggcaaggatttgccaacctcctcactcagccattttggaaggtctgctgtcttgggtatgttgttgttgtttagaaacatacatgctacaaagtacactcttgagtatacagctaaagatttcttacatgtgaaaacacactcgtaatcaccacccagattaagatacaggacatgtccagcacccgttaatctttccttcctagccttctagtttcatcccagagttaaccactgtcctgacctctgtcattacagattactttttgtaatctgtgtggtttttttgttttttgttttttgtttttgagacagagtctcactctgtcgcccaggctggagtgcagtggcacgatcttggctcactgcaagctccacctcacaggttcacaccattctcctgcctcagcctcccgagtagctgggactacaggcgcccaccaccatgtccaactaatttttttgtatttttagtagacacagcgtttcgccatgttagccaggatgatctcaatctcctgacctcgtgatctgcccgcctcagcgtccaaagtgctaggattacaggtgtgagccaccacacctggcctagatatgaggtttttttgtttgtttgtttgtttgttttgttttttttcttgagacagagcattgctctgtagccaggctggagtgcagtggcgcgatcttggctcactgcaacctccacctcccaagttcaagcgattctcctgcctcagcttcccgagtagctgggagtacaagcatgtgccaccatgcctggctaatttttttgtattttagtagagacagggtttcaccatggtagccaggatggtctcaatctcctgacctcatgatccgcccacctcagcctccctaagtgctgagattacaggcatgagccactgcatccagcctataatctgtgtgtggtttttaaacttcatttgaatgaatatttaaaatatgtcctctttttcctctagcttcttttactcaacatagtaacttttgaaatttatccatgttttaggtgtagcagggatttttaattttttaattgttgtataatactttattaatagatatgccacagtttccttattgtgggacatttgggttatttccagtttgtggctattattaatgaagctgctatgaacatcctcctctttgtctttctatgagcatacatacgtacagttttaacgtggtcagcaacataatgcatgtgtaatttaggctcttgctcttttttttttttgagagacagagtcccactctgtcacgcaggctggagtgcagtggcacgatcttggtgcactgcaacttcccccttccaggttcaaatgattctcgaacctcagactccccagtagctgggactacaggcgcataccaccatgcccagctaatttttgtatccttagtagaggtggtcttgaactcctgacctcaggtgatccgcttgcctcggcctctcaaagtgttgaggattacaggtgtgagccactgcgcccagcctggggtcttgcttttttaaacttagcattatatcaagtgtttttccttatctctgtcattgtcatgacaagagtcattattttttcaggtaggtataccgaaagctatttccatttctatttttagaaaaagtcaaaggcctgtatttaataattactcttgacaacacaggtagcagttgatgctcaattcaataaatatttgttttcaacttttaaagaaaaactccagaatcgtatgctttttaaaaatagtatttgattgaagattaaacaaaacttactgctttttctgccccttgaaatgttccataactctatgcaattcacatattagtagtatcactttttaaatgtacaaaagcagacattactgagagccttggcctcaaaacattcatttgattgcctttctttaaaaacatatttcatactgggttatggaaaactcagcatttggttttggatataaataaagccatatgacctttcatatttaggagctgaatccctcttgtagaaacttgtgatgttgctttgcccactttcctaccctccctaccacgtcatccaacacatgtgcacttatgctcattcacatacacctcgcaggctctctgtgtcctgggacctacacttcacatagtacttggaaatattttctcttgaggaaatggatattagagttgcaatggtataggaactgtatacgtttttcctatctatactgtggtttttcttttcaaacattgtcgagatttctgatggataacagtagttgtgaaagacacaaggagaatgggagggaaaggaattgcttaatggacctcacataattgtgactatgactccaggtctgctgcgtttagaaatggaattgcgggcagatacatttgtcaaatttaacttaatcccttggcttttatctgatgtatatttttccattaacacagtatacctttcatctctactttcacacagtcaaacagcgtctaatttttggtggactttcttttcttcttttttgatgctaacattatccccgtagggtcctaatcaggttttagactatggagagaagaccataagaatcaccaaagcggaatttcccattgctggtaaagagatgcccaagatgcagaaggcttgaaataaatcgggcatgaaataagtggcgttacagccctatactggctttaccgcaagggttaaatttgctcagtgtctgcaatttcacctttcctgattgtcatacagagtgagatcattgtccaaaggttgatcatgtggaggatgtatgtgcttttgaagtgatcaaactaaaagagaaaacaaagctcatggctgaagtcatcacacctgaataccatcttgtgatgtcatggttttattggtatgaattctaaccaagctgtgggcatttaagtcatatttgtggatcagaagccatagatatttgcgcttctcataggctgtgcttttctgatactttgatcattattatatggtaactaacatatattaatatattaatgtattatatcatatttatttagaccccagtatggatactaaatgggataaagcatatgccaagattttttaggtcttgggattatttaatttttttagaactggcgttcattgattgtcattcacgtttctcttcacttccttatgaaaagtttctcaactcttctctcagtattttcttttcccctgtgagatatgtttccttttacactttttcattcctctaccaaatagtaataattgcaaacatttattgcatgtttatgtgtgtaccaggtgctatgccagttgtttttatgtgtattttctcagttgctgtcttaacggctctgtggtatttttatccttggtttacagatgaggagactgagcctcttttggtctctttccccctttaaagataaactcctcctatctccttaaactgagcttgtaacctggacctctgattcaacagcccacaccccaatttgtatttggctatttgtattgggctatttgggtggtggtcctttgaatgttgttgtgctaatggaggcctaaacgttgaatcccgtgaatggaaacctcttcacatctttactgcttgtcctgggatcttcacacctggaatattgatcttcaccgagtaatttgggaaaaacagaggcagaggctggaagctgctcaccgtcctatggcagggcaggtaatgtccttaatgagatgggcttattccagtggagcagtggtggggaagcaaaagcttggtgttctctcctcatggttgcgaaaatattcacataaaagattcactagctactgttaataattgaaggactttcctcaaaatccatgtattataacggtttaatatactaaaatgatttggaggaaatcggcctcagcattggtgaatgtgttgacatatgaagctattatttttataattcttattttagagatggagtctcactgtctcacccagcctagagtgtgttggcaagatcatagctcactgtaacctggaactcctgggctcaagtggtccttctgcttcagcctcctgattagctgggactgtagtcacatgctaccacccatggctaattaaaaaaaaaaaaatgtgtggagacaggatctgactatattgcccaggctggtcttgaactccgggcctcaagtgatcctccagccttgtccttccaaagtgctgagattacaagtgtgagccaccccacccaacctaaagttgttttaagcttattgtgtgcatgttggttgtgtcaccagccgggaggggcttataggctgcaacactgttttctttcctatactacctttattatcacgtaataactaaaatacgtactatctgtttttaggtggatgctctgcttctcttgatagatatgaaagcaggatacctatcttccacccctgtgtttttcttttttcttttcttttctttttttttttgagacagagtctcacactgttgcctgggctggagtgcaatggtatgatttcggctcactccaacctctgcctcccaggttcaagtgattctcctgcctcagcccaccatgtagctgggagtacgggcacccaccaccatgccgggctaattttttgtgtttttagtagagacgggggacgtgatttcactgtgttggccaggcttgtctcgaactcctgacctcgtggtccgcccaccttgggctcccatctactcagatgtcctgtcttcacaggggccctctttgaccaccctctgtaaaactgtactcatattattcactattctttaccttgaccctgtattttcttagcacttatcactattcgatataacattttatattcttcaccaccaacccagactagaatgtcaggtccctgaaagtgaggtatgtgccatactcaccactttctccccagtatccagagtggtgtgtggtacatagcgaaactcagtaagtattattgaatgaatgaatgaacacagatgactagaaaaatttctagaaaattttaaaacatgggcatattagccatgaatttaatttatagttttgttgttttcttttgggtattcaaaaatataatttcatttgtttatatctctaatgagatagtacagtatttgtgattcttctagtgtgatggcatgtacagtttcattggtgagtatatgtgacctactgtgccaggtggaaatggagtgaatgaacattttggggggaactaaaaagcaattttcaacctttttgataagctaggttaatactgtcttctcaataaaaagtactttttcttcctcttataatgttcatggtcttcatctgtatgtgtatattgccgatttaggaactaaagccgaaatggatctcagactatttcccacagactggtagctgtatcccctctgtcagcaagtatttgatatcttcagtgaaaattgtttctttttccacttttagcttctgtttagttttacaagtctaaacaatttttggcaagtgctaggggctcacctgatgcactttttaatgcattccactcctcgttgttattttctctgtccagtacacatggtgctccttccccctcattgccatcccactttggcagaaagcattatggatgctgtgtatgtagactcatcacccaagccagcatgcatgggagagggggcctctagaataataattgttacttggtgttctctgtactactctgtttaatctccctgcttaccacttactgccttcgtaaagtaagctcaatacaattatttattgcaatttgtgtagaatgtcagatgtggaacagactttgcacactcatcagatccagcccctttgttatttagatacaaagactgagccctcagagaggagtcttgcactagactctagacctcccttgggcaggggactttcttgttcactgttgattcctgcttgtctaatacagtgtctccatgtaataggtgctcaataaaaaatattgcatttttcaaagtctcatatgtaagtagtgatggcagggccagaacttgaaccttgcatctcctagttatttgttcattgtcactgccacaattatctcattgtagtttaaagagagtcagcttccagtcttttaaaatacaattacctttaattcatctgtggtaaacaaacagcagctgtctctcattggcatggccgcagttccaccactgagcaattctagaaactgacactattaaccattctgctaaaaaggactcttctactcatatgatatcctggctgtgtccaaagtgtaatatttaattgcattttcttaatctttaccactgtattgctaagctttctaataccttcaaaataccaaatctcaggcttatcctaattaaagaatctcaatttaatccataatgcatgacaattcaatttgttgattgctttttctccccctctttgtgaaattcccgtcaaatgtattaattcaacatgatgaatcctgtattcaacccactggagtgaataattaaaattagctgataaaactttcagcagaattactttgtgaaattgctgaacagatgtgtcattttaatgaaaatccacagacaagctccttctccccctcggcaggataaaaatattatcccctcggcacatacttaatttggtggtaaatacactcggagcgattgctggaagggaagaaaaagcaacttgtcacacttagtaacttgatttttccccagcatgcagtaacagctatctacagtaattcatagtgctctattgttgctgcaagtcccaaagagaacttattaaaatgcaataatctcctatttaaacagaaacaataaccattaaatttcctgtggatccaaaattgagcacaagccccatctggtaagagtgattagaggcctgatgagggaatttaatttgcaacattcaaagactaaatctgagcagatcttgtcacctgggactcgagtgctgcttgctgtcttcttaaaaatctcgacctaaactgaaaatggaatgtagaagtgaaaatgttacccaggggccacccccaacagtattgtgtttcattatgtctccagcaggcctagtgagcagaggggattttagtgctgtccgctttagctttgccggcaaggccttttgacaggaccaacactaatgctgtcatttcctctactgccctgtgcatctgtcatgtggctgcccctcttagatcgtggactgcctgctccctcccttcttatttactttcctcttttagcttagcaagtcctctctctaactttaagagttctctagatctcaccagtctccctttcctgtccaaggagtcagatgctttcagcaggctactttgagcaccactgtatcatgctttacattttatgtctcctccttgcctatagacagtaccccctctgagtttattattagtgttttttttttaactgtaggaggactaagatttattgcatgttattagtaaatacaaattgtcattttcctcctcttcttagcttttctcttacaatcccccaccttatttatattacttctgagctccagagaaacaagatatgcgtgcactcatcatcagagagatgtgtttctgtgtatgtgtgtttgtgtgtgtgtgtgtacatgcacttgtttgtgtgtggttataggcctgatcagacagatgtcagtttatcaattagtagaactccctaattaagtatttgctttgagcaatagagctcttattggttgtgaggtaacttggcaggagggaggcagttaccgatgtaatagagatgcctgagcagatagtttcgttgagcagatactatttgatgtcctttaatcatcagactcctccacttttccttcttctgggctcctgatttatccctaaacaatcagagcctctcctccataattttatgaactacaaaatttacaaaaatgttttacaaaccctctgcctccccagtatcttctccagcccccatgtcttggggcaggccacatcaggtctctctggctgcttcctttcccaggccctactacctactctggcccatcatatgtcttttgagaagatgatttttcagttcttttctttagtttagaaaatcagaattaattgattaatttttaaccccttctacctttctcctcccctaccatatgaattcatgcagagccagccctgcaacctaattttttttgttttgtttttgagacagagtttccctctttttgcccaggctggagtgcaatggtgcgatcttggctcactgcaacctctacctccggagttcaagggattctcctgcctaagcctcctgagtagctgaaattacaggcacccaccaccatgcctggctaattttgtatttttagtagagacagggtttccccatgttggccaggctggtcttgaactcctgacctcaggtgatctgcccacctgggactcccaaagtgttgggattacaggcgtgagccaccatacccggcccctgcaacctaatttttaaggagaggtggtaaggttcattccatgaatcataccacttggaattcttgaaaaattaattgcatttattgcacacctactctctgtaaggcaatgtacataagaatggaggagatactaagaaaattgagtcccactcctattgccgatcgggaaagtacggcataagcacatgaatatttagaggtcctgtggtttaagtaacggtaggtaaggaatcattgggccagatgggatcagtgactcactgaatattataatcagagatgtgagtgcagaataaggaggagatatgactggggactggtgtagttcttagaggttgcctgagctggctagcgtgacattcctactaagcaatgagcctagcaaccagaatctcccagccccggtagccaaggagcacaggtggtaggctatagaaggagatttaatgcaacacagctgggttcaatatggtgcctctttcagagccctggctacaattgatgtaacctggtaactagtagctttgactttgatgtcagacacatctggttgtgaatattccctgaaccactcttaagagtttctcaactctttgagtctgagttttcttgattgtaaaatggtgtttgataatacatatgtggttttcatggggattttgtaaagtgcctggcatatggaaggagctgggtaaatgatggtagtacacttataatcttaagggcagaaggaatgaattaaatacagagtgaggcctagggactcttgctatgctccctcctgactccggtctagtattactaacatctttccagaaaccattcttctttatgttggttttggccctttgtgtccccatctctagccctttattcagttggtctgctcaaggcttgcatgccatttttggcattgaacatgtgatcctctagtttaatatagcatgtgcaatatggtaatttaagaaaataaatgtctgtatgcatagaaaacacagcatcctcctttaattcatgggtttatgggagattacagttttcttttagtttaagcctacaaagtgtttatagtaaaaaagtttcaatgaaatgatttccaatttatatttccttttcactcaccaccacaagtcagaaatcaaatcttatgcttagaagaaagcaactccaggactgtatccacttcgggttttgaataacaacagtaaggtggtctgactccaagattaggtccttgttgtttggacatatctaacaaggaactccatccccaagtgctggagaatccatgaagtcagtggtgtcttatgaagcttgagcaattgggaagccttcccagtcagctttttggcctcctctaggtcttaattacaaagcggattcatggtcctgcctgaaatctgattgagacatagactcctctatcccaaatgatatcattatcaacattggttccctgtggtacacatttgtcatattcattatgatttgtacctaagattccaggccacaataatagggtaagagtgtataatgggaaaaataacacaaatcgttttgattttctttaaggaaattcattgccttaacattacatacttgcctttgttttaaaactcactctatgccttatctaagaggagtcaatataaaagattttaattttagccccatatgctgtagctatatataaatgttctgtaaaatatatcccctagataaaagtacttactacttttttgaagttttttttaaaacctttcttttggtaaataaaagtctttttagctttgatgtgactattacacccttggtttgggttctttctccattccttcatccctagcccctgtgggacccctgtaagaaaaatgggaggggagagaagcatgaattccttaataagtcccaaaggtaatcaaaagaaagaaatgcagtatgaacaaactcacaaaatattcttgtgcttctttggggaatacttaatgcacataaggtcaggcctttgtaatgttaatttgagagtgttaggaagaaagccatcattttacaggcaatgttgctctctgaaaaaagctttgatttacagagaaatgctgttctaacacacctgcattaaaccagtgcctgccgactttgagaggcctgagttgcttgagcagaggaaatgcttcattgaggatgcttagggcatttggctgaagtggtaggaagtttgccagaggtcctattttcctgtggtcaaaacaacctgttcagtttggatatggtacagcccctattctttagacatgtgcagagtgacagcacaattccgcaatggcctcctttccaagattggccttagggagggaagtcttaccagacacagtggcaacatagttagtataggtatcttggttatagaggttagacatgaatagcctggtttccacctcaggtggttgcccgtgccttctcatcaacttgtaaacctccatactgtgtagaggagattgtgtggctagaaggaatggattcatcccaaacccccaaaacaggattcggataagtgaccatccagcctgcaccagagcattgccagagactggccattaattatcttcagaggcctctcagttcatctttggctctcctctctcatccatttctgtttcttccttcttccatccatacttcccctgctctttcctcctgccttttatattggtctgtattctacttttgggtgttatacaaatcagaaaacatttttatgttaaaacaaattaaatatgaatactctttgtgaagtgcctgacatgcagtaggcactcaattacttcctctcttccatcctactgtgtgataactcttctagtaattgagattatgttatcatgagactacatgaaaatattatcatgccccttctgagttaatcttattcaacctggtttctcatcccttcatcttcttagtctccctgccctcaaatagtccactgtgtgtgcacgtgcgcacatgtgagtgtatcttaaagtacagttttcaaaactagctgcacttccctatgttgggtctgatttgccaattttttatgaaggaataagcaaaaagaaagagagcaagagaggaagaggggagaaatgccgtgcttttctagaggagcaaatatatggaaattacccttgtttcttctctaaagtagtaaaggtcacagcagtagttgcaaaacccgtaggccgcctactgccttccacacattcagcattactattcttgcctattttacccttaggcatcctttatttcttgcacagatggtctcactcaggcctaacaaaatgttttaagctttgcataaattaaaacgaggtctctgagtacaaaagtgcaacttgttttttacttgaaaacaactatgctggcatcttttacaaaattacagcctcaagccaggtttccataatcagttttcctttaaaaaatagagaggaaagaatgtatccttgtgtgtgtgtgtgtgtgtgtgtgtgtgtgtgtgtgtgtgtgtgtgtgtatgagtatatatataatatatgtatgtataccaaacacaaatggtcctaatcaatgggattatggcttttatgatgttctgtgttcctttgaaggttgatcaggcatgagtggtggatgattcagtttgaataaatagatttggaaatattattttgggggtccaggatttctgagtttcttcattagtttagtacatgataacaactgttgagacatttcagtgtgcggagactccctcctagaactctttactatgtaccttataacagggttttactcaggctaaccttgactgtgctcaattgaaagaaagtgatgagtcagctcaaagagaaatagtctgtttctcccaactctgcgataatgtgtcccaaagtagtgacacatggcatattccattcttaagataactggcagacaatttgtacaatcttctagacacattgcttccctttgattcacacatcatcaccaaaagggtaatgctacaaatcttttctctattcatgactactcttaacagggatatggcttgtaaagaagcttattgatgtgctttgcttgaaatagaatcattagactgggcctgccctctcatttttaccttgacagtaatagtaagagtatgggagatactcttactcttattattactataactataatagtaatactattacagtatagtaatactattacagtaatagtaagagtatgggagatactcctattcttactgttactgtcaaggtaaaaatgagagggtactgtgtgagttattttttatatattgtcatcttttaataaccctatgtgcccactatagagaagttggaaaatatagaatagaaagaagaaaaagttatttttttattttccacagttaatattttcacatattatttcattatgtttatttcctcacacactagtgatcatactttcaacagatcatactgtagatattactgtagatgttatattcatttgttcacttaaactaataatttgaatatactttactattattaagaactctttgttaaagatcaaattgttttaaaacttaagttagagaggcatttatagcattagataatgccagccaggacatatacactatctttaaaaatgaatctaacccttaaatgaaatccagcagccaatctaatgtttctttgtaataagcaaaatatttttctgtgttattgcatctcacaggaatctattcctaaaggattcaatagtaaagatgctcagtaatcatgctctagagtttctcatccctctaaagaacacacagcagttctgtgaatgactaaggatcagcaggaatggatgtcaggtgaatgttggcactactggatacaattgatatgctttatggattttttgtttcaatgtgattctgcatagatggcacctgtaattatgaccatttggatcatgtgaaaaatgataaattttcggtgaaagggaatggtgcttgatccttttctttgtctttgaactgtttagaaacactaaacttaactgataaaagtaagtgcaagatggccgggtgcggcggttcacacctataatcccagcactttgggaggctgagacaggtggatcacttaaggtgaggagtttgtgaccagtctggccaacatggtaaaaccccgtctctactaaaaatacaaaaattagctgggtgtggtggcgcatgcctgtaatcccagctacttgggaggctgaggcaggagaatcacttgaacccaggagatgaaggttgcagtgagccaaggttgcaccactgcactccagcctgggtgacagagtgagatcctgcctcaaaaaaaaaaaaaagtgtgtgtgtgtatatatatatatatatatatatataaaaaataaaaaataaacaaaaattaaaaagtaagtgcaagacatcttagaagtattgcagttttttaaagctcttgacagagtaactttattcatgcaggtaaattctagctcttttgagcaatatgttaataagtcactgctaatggcctaatagtttttaacttacaattaaagacccatgatggaaactggcagcaatttcataacccaccagtctaattgtttcacagtgaacaattatttgccttgcgaatacttacagtaaacatttctgtaaagtttatctttgtttcctaaacagtgatatttgttttgtacattctgtagatggaatatattctgcagtttggtttttctgctgcttagttgctgagaattgactgtgttgttgcacatagctgtaatgcattcattttcactgccctgtagtgttccattgtatgaatatactatggtttacatataccttgtattgatggacagtggacatacaggttgtttccatttttgatttgttagaaatagtgctgtatgactgttcttttatgtgtctcctggcacatatccttgaaatttacttagcattagaattgcttgggtttagggtatgcacataaggaacattactagataacgctaagttgatttcaaaattaattgtaccaatttccactctaactagcagtgtagaattgttgccatcgtttccacattttcatgaatactcttatcatacttcatatgaaataatcttgtgcacatgtgtatgtgtgtgtgttcaacagcctcattgtggttttaatttgaatttttctgccctggtttcctcttctgagcatgttcttttgggttttttaatctatgtctttattttaatgttgaactttttcttattcagttataagagtgctttatatattttgatcactattcctttgtgaataatgtgtgttccaaaacatttcctaagttatggtttatcagcgcattctgtttatggtgtcttgtgataaaaagttcttaatgatagaatagttgagtttatcaaacttttcctgtatagtttgagtcttgttttgagaattcatccctactctgaggtcataaaagcattcttacatgttgttttctaaaagtgttctagttttatcttttacacttaattcattgctttatctggaattaatcttcatgtatgatgtgaggtaaggtaagggttcaactttatttttctccatatggacaagcaactataataccattaccataatatattttaaaagtttcttcatctctcagtgatctgatggaccaactgtcataaattatgcctccaaatttgcctaggtttatttctgagttttctctttcatttgtttgctaatttatataacaacacaacactgttgaaattattacaacttttaattattgcttgatattttaaaattcagtctccctcccccacctcttattatttttcaggtacacattggtgactcttgtcttactactcttccgtgtaaattttagaatcaactcatcaagtttcatattctcaaaaaagtgaaattttcattggaattgcattgtttattggataatttagaaggaattggcatctttatgatattgattcttctagtccttgaatataatatttatctttatttatttaaatcttttttctccttccggaaaattttatggtttttctctatatgttttttttattacctatttgcaaatttctattagatttgttcccaggtacttgattttttttggtcctattataaatggtgtcttgaaaaaccatgttagcagcagttctcgttcttcgtatatacccaaaatcattcatagcagggactcaaacagatatttgttcaccaatgttcatagcagcactattcagaatagtcaaaaggtagaaataactcacatatccattgactgataaaaggataaacaaaatgtagtatatttatacaatggaatattattcagccttagaaaggaaggaaatgttgacccatgctacaatatagatgaactttgaagacattatggtaagtgacacaagtcagtcactaaaagaatactgtataatttcacttatatccagtgcctaccactgtcaaagtcatagagacagaaagtagaatggtgattgtcagaggctggtgggaagagggaatgggctcttattgtttaacaggtatgaggtttcagtttgggaagatgaaaaaatttctggagctggatggtggtgataattgaacaatattatgatataattaatactattaagctacacacttaatggttaaaatggtaaatttcattttaatgtatattttaccacaataaaaattatgtgttctaaaatttactgctggtgtatagaaatacacttgatttttgtatattgattttgaatctagcaaccttgccaaacttaccagttatagtaagttttttgcagctcgtctagatttctgtatatgcagtaatgtcataatgagcattttgtttcatcttttccaatcttcatacttttatttatttatcttgggttatccagttacctatgacattcaataatgtcaaatagaataataatagcaggatttcttgccttgatcttaaaagaagcgcttagaatgtttcccattaaatatggtattttgttttgttttgtttttaggtagcttttatcagattaaggaagttcccttcatttctagtttgctgagatttaatttttatcatgaatgactgtcagatgatttattgaaatgatgatgtgattttcttctaatctgttagtgtgataaactacagtaattgattttccaatgttaaatcaatctgtaattcgggggttaaacacaaattgattatgacatattatgcctttcacacaatgctagattcagtttgctgacattttacttaggatttttcatccaagttcatgagtccagttgtcttgtagtgtttttctcaaatcatcattttgaggattggtatcaagattctcccacctcagccttcctagtagctgggactacaggcacccactaccacgcccagctaatttttgtatttttagtaaagatgttcagtaaaaaaacatcattttgccatgttggccagattggcctcaaactcctgacctcaagtgatctgcctgcctcgacctcccaaagtgctgagattacaggcatgagccaccgtgcccagccatgtctctgtgttttaggtatgtttcttataggtactatatagattgattttttttaaaatttttttctcagacctcacagggatgaagatgttttaaaaagctcttctgaccagataatatttgtctgttaaatggagctttttgtctatttataattatagatcagttagaatttattttgtgcattctatttttgccctttctacattttttttctgatttcctgcttttctttgaattgtttcttcttacttcatttttttcttctgcaatttcagaaattctgtaaaccattttcattcttttggttgttactctagaaatttaataaaaacatttcaaagtctaaagttactcaggaggaaaggaaagataatgatgaatacagggacttttgaacactttaattcccatcagtttgttatcatttaccttaattctgttgtatacacccagcagatgatattgttcagaattaaccacatattttcccatgttctactcttcatttttattgctttcagaccattcatgttggatcacttttattctagataaattatattttttagagaatttttactatggaaagatactttttactctatgatattttaagttaacaagtttcactttgaatattgaagatgtcattctagtgtcttcaagattctacactgttactattgaaatataaggtgttatttaattgttgcttcctttaatgtaatttgttctttttctggctgcttttaagtctttcttttgtctttggtgttctgcagtttaaggtgcatttaggttgaaattattttttgcgtaacctgcttaggatttgttgtcttctttttttaattttaaattacgttttatttaacccggtaggtccaaaatatcatttcaatatgtgtcatcaaccacgctgcaagccctcaaaagccacatgtggccagtggctaccacactggaaaccatatgggacagttctatagaatggagtttagtgcgcattagaataaatgggaaatcttacttaaatgcaagctcctggggcgcgttcttagaggctatgattcagtaggtcagcaaagagaccctgggatcttcatttttaacaagtttccccaagtgactccaatgagagtggtctgcagaacactctttgagaaacactgatgtaggagattgttcagggcaaagcagaaggttcacctgactctcagggaaccagaataacctagtaaccatgggatcattgttacaggatccacatccctaagaggatgttccactgcagttttcatttttctctgactcaaactcagtaagtggattagatacatgcaggtgatgatgcaggtgcccatatgggacataaaaatttcaagttgggtccatttgttcttgcatcaaattatgttttaagtaaaatattaatattttaagtaaaatattttaagtaaaatattaatattttaagtaaaattttattttacttttaaaatattaattttttacttaaaacattaatttacttaaaatattaatattttacttaaaacataatttgatgcaagaacaaaatattaatattttacttaaaacatttaatattaagtaaagtattaatgatcctaataaatggggaaggagctcagacagaaccccattcccttcaaagcaagacaactttgaatagctgtgaatcttcataatggcttctctttatgaagccattgttttattcaaggatctactaattgggtaacaccatctcctatgcacaaacatgccctaaacttggactcagttacaaatagggatgaaggtaagaatggtcagactgtctggattttccttctcttagtgtttctcaaagcatggtctaaggaccagatagggccatgataccagacatgcaatagacagacctgcacatttgcagcattctcctccagagacagattcacatggtcaggtacagacccagaatctgcaaggtctgccacccacctccattctctgcccctggataattctgatacaggggattagggtgaaactagtggaacccatatataccacgctgttctcatcagaatgaaactacaaaattcactaacatctctcttgtttttaattttaattatacatgtactatttacaatagcaaagaaatggaatccacccaaatgcccatcagtggtagactggacaaagcaaacatggtacatatacatcatggaacaccatgcagccactaaagaatgagatcataccctttgcagcaacattgacagaggtagaggtcaccatcctaggcagaccaacacaggaacagaaaaccaaatactgcaagttctcacctatgagtgggagctaaacaacaacaacacacagacactaggaggggaataacagacactggggcctacttgagggtggagggtggtaggagggagaggatcaaaaaactatcaggtactatgcttattacccaggtgacaaaattatctgtacaccaaacctctgtggcacgcagcttacccatataacaaacctgcacatgtacccctgaacccaaaacaaaaattaaaaaagtatacatgtcatatgaataaatttccagttataaaatatttctttttttttttgttgagacggagtctcactctgtcgcttgggctggagtgcactggcacaatcttggctcactgcaacctctgcctcccaggttcatacagttctcctgcctcggcctcccaagtagctgggattacaggcgcctgccactacacacagctaattttttgtatttttagtaaagagagtgtttcaccatgttggccaggctggtcttgaactcctgacctcatgatttgcccacttcggcctccaaagtgctgggattacaggcgtgaaccaccacacccggccaatataaaatatttcaacaaatacaagtaaattaagtaaaaagttccctcacctcttctctaaatgtactcttcccccggggtgaccacttttatcagttaaatttaaggatttcttgtcttcttgtatctttggattgatatttttcatcagttttggaaaattgtctattcagtttcttttcaagtattgccaactcctcattctctctttcccttcctcttctctgggaactaagattatatgtttgttagaccttctttctcactgtctcttccttgactgtcataatttctgtactacattccagatgatgttttattttagcttccagtttgcttgttggctcttcaccagtacctaatctattgttaattctgattactgagattttcaattttgattaatatagtttttgtttttataatttttttaaatttaactttttatttggaagtgatttcaaatttgaaaatcattgtaaggtcagaaactgtgtgaataataccatataccctttacctagagcctctgattcttatttcactccatttgatttataatttgttttttctctctcggatatatttttttctgaccatttaaagataaatttcatacattatgacctttttcactaaataatttaggttatatatttcttaataggcatattctcttacctgattacagtatagttatcaactgtgaatattgctgcaacgaacatgagaatatagctacctctttggcatactgatttcagtttctttgaatttatatcagaagtaagactactggatgataatgtaattctatttttaattttctgaggaactttcatactgttttccttcatggctgtattaagttacattcccatgaacaatgcacaagggttctcatttctccacaccactgccaacccttacctttcatccttttgatatctcattgtggctttaactttaatttccctgttgatcagtgatgatgagcattttttcatatgtctgatggccatttgtatgccttctttggagaagtatctatttaggccctttgcccattttttgactgggttatttgttttattgctattgagttatttgagttccttatatattttggatattaaccccatattaaatatatggtttgcaaatattttctcccaatctgcaagctatttcttaactctgctaatcgcttttttttgccatgaagaagatttttagtttgatacaatcccacttgttaatttttgcttttgtagtcatattcaagaaatcttttcctagaccaatgttgtggaacgttttcctatgtttttttccagtagttttacagtttcagatcttacatttaagttttcagtccattttgagtttatttttgtaaaaggtgtgaagtaagcatccagtttcattgttctgcttgtggatatccaattttcccaataccagttattaaagagactatcttttctccattgtgtgctattggcatctttgtagaaaatcagctaaccaaaagtgtgtgggtttatgtctgtgttctctatcctgtttcattggtaatttgtctttctgccagtaccatacctttatgatcactgtagctttgtgatagatcttgaagtctaggtaacgtgatgtttctttttcattttttctttatgtagtcaatttatgaattcctattttcctaagcagtcttgaattcattactaaataattttagtactcatttcatatttggccagtggtgtccacatctaaaatggctcctgtaacctagtgatgtgctcatgtcattgatttgagcagttgtttatgttatggcataacaagatgtcattttgtatctactctgccttagtcctggaatggaaaaaagaaattttttgaattcaaaactgttgattctttatttaaaatctttaactctgttagtacatactaggtggtgttgattttttttgagactgttattcttcttgagacattacatatacttagcgtgtctgaaatttcaatgtctgaagcatttccaatgatttatgtatctgattgttgttatctgccagctttcactcatccttttgcctttccttacttgtttggtaatttttactgtgaattgcttatttccctgagaactttgtgtgagtattgcttgtttttcctggaatttttaggaattctttgacacctgggagaaggtggtttttaccagatatttgattatttcatgcctctagtgaaactacctgtgtgagaccatcttatattctcagggtgaggtttttcttttcagaccattttatgtaaattaaggctttaaaactctatgagagtcagcttgtcattatgcattatcagaagagattttttttttctgccggcaatactatttgagatgagaaattttcattgcaatttacttgagggagagggtagtttatttttagttcatctagcactgaatgtgtagtaggtcttttgtgtatagctctgttgggatcttctactagatgtcttacctggggtgggggccatgtgctatgctcttgatccctggatttgtgaagacttgaagccaaagctgaagttctaactagtttgggaaatattcataagaggaaacaaaaactaaattttttttcttctctttgctttatttttgacctgagtattgcttactttctgtctagctcatggatgtagattagaataatattttaaacttcattctgtttagtttttaaatcgttttcagtggaagtatcagtcttagtacctaatctcccatggcataaggctggaaatagccatgatcctgccaaacacggacactctgcaacctggaacaaaatattctactctaaaaatcaagtaattatgtcttttttcaataaaatataaagtataatcattaatgtaatttacttctttcattccagtcttcactcatgctttcaaacatagattatattattccaacccttcttaagtggaattagtatttcattattccataaggttctacaaatacctacaaagaccatcatgaattccaggtgctctgtaacctgatcaggttggagaactgctgatgcaaccaaatttaatcacttaatgttcttactaagcactcatttgtttttctgcttctatgacttgctctcactgcttgctatcccaaacactgtccgtttgtacatgttccaatgtcaccattcctttttcgggcaaatgcttcaaaagctactgtttctataaaactttcctttacccttctcttttgacttgttatgagctccttttgtagtttgtaatctccttaagagcaaatttcacaaatgttatatttgtaatatcttatgtagcagagtattctcacagtctagaacagatggttcttctgtatctgttgaaagaaatgggaagatagcaaagcaacataataggataattttatttttgcctactagactatctcaggatgtatgtgttttaaatcctaaaactggttagtggtatttcagttgaaaaggtcttgaccctttcccttctaacataacaatcctcatcataagtgagagagaagattgggtgagtagggctcagtgggggaagctggttcctttcacccaccttcagaaatccaggtatggaatacaggggttgttctggacctcaaaattacctttttttttttttttttttgacggagtctcactctgtcgcccaggctggagtacaatggtatgatcttggctcactgcaacctatgcctcctgggttcaggggattctcctgcctcagcctcccgagtagtggggattacagggatgtgccaccacgcctggctaatttttgtatttttagtagagacagggtttcaccatgttggtcaggctggtctcgaactcctgacctcgttatccgcccgcctcagcctcccaaagtgccgggattataggcgtgagccaccacgcccagccacgaaattacctttaaaaaggtggtctttaaaaggcaaatagggagatactaattgcaaaaaaaaataatgatgaaataagttatctttctgttttccactttttctgtggtgttccttttgacatttgcattccaaaccagagccccacaaataactgagtttgcactcttttggcaagcaaggactgctctcagatgtattttataacttcagcttatatgggaagaacttttctttccagagacggtttcatagtaatatccttcaaaagctcacattgtagaatatgacttttttttttctttgttgttatgtttgctttgttttggtgggttttattcatcatttcagccagcttatagaaagagatagaacttttgttggatactaaatcatgtctatcaaaagcactattgaccttgtgttgttaaaactaaaaatgtaagaacaaaccattttctaaggtttttaattatatgcactaaaacagagtaaggcctagatttattaatcattgggttatggtttgatgtggaaagaaccagcctataacttttccctttgtttaacaacgttattgctgaaaactttaatagacttaagtgtactggaactagggagtgaaatcttatctttccctgaacaccagggctgctttgttatggtgtttccatttgtggcataatgaatgtgtaggacgctaatgatgtggtctctaggtgttctcctactacacagagcactgataatgagctgcgagtaatctagtacgagtccctgaagatgaatcctgattaccttcatggggccattccgctctgctcccttcctccttgatgtttctgtaaagagcatttggattttgaagagagtattgtgtatttgacttttaattagatttgcagtgtgttgggttaataaactagggcttcttcttcttcagtttcctctaaagggatgtgtgtaaatgttgcacagtgggccaagagaacagagggtcataacaggcagcaatggtggtgtcgcccacttcatgccccagtcctgaaaagaaggcttatagtggctgaaggttgatttcatcccatggtccatagttacaaatggcttccaagctgccaaggacctgctaaacctattgcatctgttctgtacgaggaagcagtctcagaatgaaatatgacagttgtctgtcagggctgccccagagtcctgcaagttggtattatctgcttgcgttcagaaaacacatcaccgtggctgaccacagctttgtacttactgtgatcttagggctcgcatttttagggacaacttgccctttatgcctttggtccctttctgccttctgcttttgtttttctgccagttgggttcatttatcttctttcctgtgtgttttgccatgcttttcttattatagctttcagattcatcatggacagagatagaaagtactctagtgtctttatcccacctcagctctcagtctggtgtagagctaagggaaggagaattgccttcacagtcaactttcagtgtggtccctgaactttttattttgttcagtgaatccagcacatctcatattgtgccccagctataatgggtagtcctttcctgatcttctaagaaaattagatgcctggcttctgccttgctcttcattgttttttaagcatagtccttacatgatggtccgggccttccttacaggtctaattgtgtggctgggccttccttctgcatgcctattctgttttttagtttttgtttttcttttaagaattggggtctcactctattacccaggctggagatcagtggcataatcataactcattgcaacctcgacctcctggactcaagagatcctgccacttcagcctctcaagtagctgggactacaggcacacgccaccacacccagttcattttgaattttgtttttgttgttgttttgagacagagtcttgctctgtccccctggctggagtgcagtggcacaatctcggctcactgcaatctccgcctcccgggttcaagccattttcccacctaagccttcttagtagctgggattacaggcacatgctaccatgccgagctaatttttgtattttaagtagagaagagatttcggcatgttggccaggctggtcttgaactcctgacctcaagtgagccgaccgcctcgacctgccaaagtgctgggattacaggtgtgagccactgtgcctggcctgaagttttttttttttttttgtagagacggggcctcactgtgttacccaggctggtctcaaacttctgggcctgagcgatcctcccaccttggcctctcaaagtgctgggattacaggagtgagccatcatgcccagcctgcctatcctattttattctgaggctactactactccttatgggtagatccaaggatctgacatcattttcatacatcctgttcagtgtgtgagtatagaattgaggtaggctgacaacacaaaagtgggcagaggtttcccactcatccccgacagggattctctgttggcataggtgggctctggtccaactcctggccgacatgagcatggacaatgtggcacagttgtggctctgcatcttgtgtgtgactgctgccctgtttttgtttagcaagctgctgtgccaatttactatgcatgttgttacatattctgctctaatttgactgccattttgcttcagcgagacgatgattgtttatggcagggctgtaatgtgttgtcagcacaggttactcgctacttgttggcaatggcctaacattgcctgagacatggtgtcactgtgaaatggtttgacaatgttgagactgtagttatgttgagcagtaacaactgtagaggtcaagaaagggcatctaagaggaactgtgttcataggggaaagatggagaaggaatactaagtaggacagtagcaaatgtcatcaaagagcttcattttcacgcaattttcataattcagtctgttttctgtgaacagtgttggttcagctgttgctcgggagtagaagcacatttctgagttagaaatgaattgtgctgatcatgaccctatcattttcttctttgaacatttttagaaagttatccagcttgctgaagaatgcactagatccttgtccatgtgtgaggcaagggactcattgggccaccttcacagggtttcatttttggaacatttatctaaggactatcttactaccctgagagaccaagatgtaggctaccttaagtcgtatgaggctgctgtgaaaatggcatttgtttttttggctctaagaaattttcaggacctagtcaagcatgtgacaacaaatatttaatgatagtggacaaggtaaacttcaaaagtgactagaaacccttgtggaatctaagacagagggactctaacaagcttgatgacattttgaatacgttttgtattgattactgactcttttcccaataatctgtgaagctggctttctgtttggcaaggcagccccaaaaggaaccttcatcccatacctccatgcaggagtagcacagaacagcacccagcatcgggccctccagagtctgggagggttcggttgtctcatgaattatgtggtgcccttcaggaactcactttgacctctgatgcctttcctttcaagcaagtggtgtggaaaaatattaaaactctcagtaatgacagtttccagatatgcatatctttgagtggacaatgaaggcaacatttatattctgtccacgatgcgagcatggtatgcattctgcagctgtcacagagccttccttctggtaccaaataccttacttcctgacaggtatgacctctgagacctccctaacccctttctttcatttcatacaaaaatctagagcttggcttttttttttttccttctttttttgtaaaaagaggtttttccattttaaaaagccttttcagttcttaaacttgatcattgatatgttccacctcatcaaaaagaggagtgcagctaaactgacaatcagttcatgccattggcctcactcatcatcatgtcaaggacctggcatgcccattgagaagggcctctgtgcattctgtcctcaccaagcctaattccttcccctgttgatggttttgccagattctttgcctgttgatgcccatgccagggccacggtgcttatgccaaagcctttgacagaatgagtcaaatctggtgccagtcacccttggcatatgccaccttgttcttgaccacttcctaccagggatgggctgaaaagaatagtgtctgctaagagcttgtagaggacttttctgttaagtgctaagtgttgacattactccagtttgaatcagatcatttggaactcttgcttggatctctcaaagctgttgactcatttgtatcttggcctcacattagtggggtagataggagccaaaaagtttgagtgaagtcagaataaatatattttaagtgtggatctgtggagaagaaagaggtcccaagagcataatgaaaactgtggttaaaactgtgaatcaagaggtttgttttaatttgccattttcttacgaagttttaaaatattttctaataaagcttcttatttattgccttagtacattttctgttacttataacagaatacctaaaactagataatttatggccaggcgcggtggctcacacctgtaatcccagcactttgggaggctgcagcaggcggatcatgaggtcaggagatcaagaccatcctggccaatatggtgaaaccctgtctctactaaaaatacaaaaaaattagccaggcgtggtgttgcgcacctgtggtcccagctactcgggaggctgagacaggagaattatgtgaacccaggaggtggagcttgcagtgagctgagatcacgccactgtactcctgcctgggtgacagagcaagactccatctcaaaaaaaaagaaaaaatactagatagtttataaagaatgggaatttatttctgcagttatggaggctgaaaagtctaaggtagaggggctggggctgcatctggtgagaggcttcttggtggtggggactttctgaacagctccaaggcagcacagggtgtcacatggtgagggggtgagcatgctaacatgctagctcagttctcttccttttcttataaagctacctgtctctcaatattgctgcattggagattaagtttcaacacgagttttggagggggcatttaaacgatagcatatatatagtgcagcagtcccactcctaggtatttacccaagagaaatggaactatatgcttacacaaagacctgtaccctttttacactttttttttttttaagacagagtctcactctgtcgccctggctagagtgcagtggtgcaatctcggctcactgcaacctccgcctcccgggttcaagcgattctactgcctcagcctcctgagtagctgggactacaggcacgtgccaccacagctggctaatttttgtatttttagtagagacaggtttcaccatgttggccaggatggtctcgatcccctaaccttgtgatccacccgcctcgggctcccaaagtgctgggattacaggtgtgagccaccgcgcccggccaacctgtacactttttgtaatagccaaaaactggaaagaagcagtatacattactaggtgaaaattacagcatatagagataatggttatttctaagcacaaaaaagaatcaaactgatattcctaacaacatggatgaatttcagaaacattgtgctaagtaagagaaggcacacacaaaaaggtacatacttaataattccacttgtgttaaattctagaaccaacaaaacttatctgtagtaacaaaaagtagttccatgttcacctgggtgcaggggtgggaacactggctacagagttgcatgagggaacattgtgggtgatggaaatgttgtttcttgattgtggtggcagttatatagatacagacatatttgtccaaactcatcaaactgtatacttcaagtgggtacattttttcttttatgtgtattatacctcaagtataatgaagttgattttaaaaatatatttgttgtaatcccacttttgccacataaacagggtccagagaaatattaggtattccttctctctctctcatgtatatcctgatcaaaacatttatatgaacatattgaaatcagatttaaatatcagtttccctaatggactcagctggactcaagttaattgacttaataaaatttcgaatctcatttgttcctattttctcctccctacagttgttatctttactgttatttgaaggacttgaataagtgaattttgaattcagataatacactatagggagtaggaaagcagacccctggcctcaggagcgcctctttgatcatgaatgtctatgactgccattttgttctctagattcatgtctttatattgtctatttggcttatagttttttctatcaccatttttgttttcaactgttttttcactaaaagacaaaatttgattttcatgctattaatttcgtactaaaaagagcacagcaggcataattaaagcattttaagatgtagtaatttgatttaaaatattttactaagcgatatattacaaaaagttatttaattatctgtaaactttaaaagcaggtattagcattctatggctattgtctttaataattacattttaattttaattttagttttttaaatgtatgtttctttttgttgttgttgttctgagatggagtctcgctctgtcacccaggctggagtgcagtggtgcgatcttggctcactgcaacctctgcctcctgggttcaagcaattctcctgcctcagtctccggagtagctgggattacaggcacctgccaccacacccaaccaatttttgtatttttactagagacgaggtttcaccatgttagaaaggcttgtctcaaactcctgacgtcaagtgatccacccccctccgccttttaaagacctgacatcttagttgttactgtgaaattgattttcttgttttctcctcatcttaaccttgttttatatatcaaagtaaagaagaggaactgttaaaacttatatgaagtatggctgaatcttcaaaaagatatcaaatatttagaaactaattttaagctgcatatgttttatgaatggtagcaatacaatttataactgtcatttctgaaatctccggatttaggtctccattgccaaaaaatgtaaaaaatagaattatgacaagtgatctcttgaattaaaaccaaatgtttttgtattacaatacctgtgatgatgattccaaacaggcttctctttaataagtggccacagtagagtcatgatgttagcccttatatttataatgaggacaattctgggtcaccaagggcctggatatgggacccttggggcccactgtgatatttatggacatgaaatacagtcataggccatttatcagatttatcaaatttggaaacttccaaataaattaatttgacaaatatacataaacttcagtaaattttattagttttattttttgccctgtgtatttgcataaatgttactaggaaatatatttaataaaagtagaaggattttttttttttgcgtgatactcagctatattcttccaatagttgtggaacagcttagtgccttcagcagtggcagtctcctaaaacgattgtctatcagttaaaggttaactgagtatttggaccaagtagcaaactagaattcttttcatctaatctctgtttaatatagggatatccaatataacatccttgggtcagtgtagtacatcttacgttaagttttgtctctaatgaatatttatattacataaatgggaaaattggtgggttcccttggtagaaacatgatattggtatttttaaagtaaacttaaataggtcagaatttttatcctctagagaaaatttcacgtctgattaaatagtttacataaacttaatctttttctgctagatgcattataatctcagatattattcatgtagctattcctctgtgaaccataaaatgttcatttcttcaaaatgaatatgaagctcaaagcattagtggtcttaagagcataaaaactttattactttgtgcttcacatttttcaagtgactttggaaagccgaaacaaattttgcatttagattaatggaagatgttttccatgtgaaggaactggcaagggagcaacaataacaaaaatcccccaaggttaaaaatgtagtgcttttgattcttcccagaactgtgttagcagaacaatcatttctcagcatggaaaggtatcataattggtctatacagtggcaatactgaaaacgagtatgcttcagagaaagctaatatgactctacttaataatttccttcaagagcctgaatttgaatgtatgttccacccagcttgaggcaaacaatttgttcctataagttctagtggaagttaccggggggtcatgtaatttatttttgtcttgaagttttcaaaactgtgtagaaataaagacacgtttacttgcattgttccactagtaatttgatccaattggcaatgctcctttctcttcttctcaattctattatgttggaagagtggaagcgttcataaaatgttgtgacaaacaattcttcctagagacgtttcctctttctgtttgaacctctgatccacttgcgaatgttagcattctttttgtttgtttgtttgtttttgagatggagtcttgttctgttgccagactgcagtacagtggcacgatcttggctcactgcaaccttcacctcctgggttcaagcgatcctcctgcctcagcctcccgagtagctgtgactacaggcatgcaccactacacccagctagttgttgtatttttagtagagagagggtttcaccatgttggccaggatggtcttgatctcttgacctcgtgatctgcctgcctcagcctcccaaaatgctgggattacaggcatgagccactgcacccagccaaatgtttgcattatttagtaagtggttttttattatgggtctttacttacatgtgctgttattgtccttttcactgggattatctaggttttcaatctgtttctttgtattaattttttggctatgggactagttttaaagccctaccacagaagtagagggtctgtagttggagtacggtgagtaacatgagagaatgtttcctttttttccttgaagaatggatagttttaggggaatgtgtgcagatgtcagaagatggctacatagagaatgaagcatcagaaggtagacacaggtctctgcattgcaaatatcagtaacagggatgaagaaagaacagcaaaatttttagaaaaagtgtaaaggatggttagacacttagaccctctcttttataagtttgattgtgtacttctaagaagcagcaataagttgaaggtaaagttatctcaatactctgataagatgtggtctctggattcataccaaacattagagttcaaggcattccccttcagtttattttatattcctcaaatgtatctaattccttaggattaatgatttgtttctcttaaaaacagcatttattgctttaatctgagaaaaaaataagacttccagtgtttatatctacaaacacaaggattgaaaaaaattttataatcagcctcgctgctaattcttataggtgaagcaatgacttagaagaatggggagactggagtacatgatagttttgtagacagccacagttggcaaaagatggtggtgaggctgtccccgttgtaaatcctttatctccatgagagcaactgttgctggctagtttcttgtgaattaagtatgcagtttgtcttttttttaatgtgataaatgaacgtattttctaactggctatttgcttaataaaaatgagtaatataataaggaattaggggagcattggaaagataatcactgggaggtgagaaaaaaagttatctctctgcttcagtcccttattctcatctttatagatcagttctcccagtgagaagccaaatgggatgtcattctttgtttgtttgtttcattaattctttgcaatctatagtaggactgttgaggagaatgtataaactgcaggttaccagcaggtggaaggaggggaatgagggcaggtggtccataagcagaaatattaattcttgactgattgggacagtgaatattgaccaacattgaaaacattatattatggtcttatttaggcctgaacactgacagccagttgacaagtctaattttttataacttaaatgtggttcatttaggaaaaactgccatcaagggcaattcaattctattatgacaattaactctgactttgaagtaagtagaataaatcagtttatttctcagtaaggcccaaataaactgagattgttgtgaaaattatgcagtttgtgactacagtgtggatgttgtgtgttgggttgtgcagtgtacaacctgcaaagctgtatgaggcaacctggacattctactcctagctatatacccaaaagaaaatacatgtttctacaaaaccttgtacagaatgtttatagtaccatcattcataatagctaaaaagtgaaaacaacccaaatgttcataaactaataagtggataaacaaaatgtggtgtatccataaagtagaatattatgtagccataagaaagaatggagtaccacacgtgctacagcatggctgaaccttggaaacattatgctaagtgaaagaagccagacaccaaacggcacatactgattgtatgagtacatttagatatgaaatatctaaaataggtaaatccattgccagtggctgaaatggggagtgattgcttaatgggtatagggttttcctttgggggtgatgaaatgttctggaatcagacagtggtggggttgcacaaccttgaaaactactgaaaaccctgtgaaatgtacagtttaaaatggttaaaatgatacattttatgttgcataaaagaacatttaaaaaaattaatccagtggggtctgatggcaaattgacatgagggaacttttttgagggtgatggaagtgttatcaatctagattagagtgatggttgcacaactgtataaatttataaaaactcatcaaactgtactcttaaaatgtgggtgtattttatggtatgcaattatacctcaataaagctgtttaaaaaaaaccctctctgagtcattactgaaatcagtgccattttctgaatttcagaaatatcaaaggagagctttcctagtgtgaatttatcataaataatgtttggtattttttttcctttgacttaacgagagcctgagatgcagaaacaaatctgcacttccatgttgtgttacccgctttgggccatggcccatttgccagttgcagattgcctccttgtctgaaaatgggtgtgtttcttcatagtaactctcaattctattgttggtgacagcgcaataatggaactttcttctgtgtggataagccccttcagtgatatttgcaaatcaaatcatatctgctttttgtgctacattgtcctcaaaatcttctgattggtttggttatagacatccctatatcagctttcctgttctctttcagtttaaatatctgtatgctgtagcaaattgcattatgaaatcctctcacatttatcgctgtttagtgcatggaaatggcatttcctcattaccagtcaaagataaactctaaatgtttctttttttttttttcctgaagtatcaaattatgtattcaaaaaacttttctctatagcattatttctctgagctgtttcttttttccctcctgaatgctgacaccagatgcagtctgcatggacattagtcccagggaaatcttgtcttctacccaggacaaggagattataggaagcaatgctgactcttgttgtagattcacaatgtgctgacacgataataggacatgaatgggcttttggaatgccttttcctttgagctgggctgagagggggacagaggcagacagctccatggcctgaatttcgttagctgtgtgacaatgggagagataagtagatgtgacagttatgaatgatcctctgtcatgcactttcacgttcagattcagataaactgacactgctgtcaaacacaagctatggagagctgagacctctgatgaaccttctaatatggtaaatgggagtcttaattcttcattaactgaaaaaaggagatttggccatgtaattttctccttgctgcctgttttaaagattccaataacccagcatttacagttgactaggcagggattgcttttccccccctacacttgcaacatgcagactgtgaaatctgaggaaacgctgcttaaacccagacttattgccttggttatctttaatgactttgaaatgtattggcctcattatggaacagtgcagttatcaattcctctaattaggtgatgtgctcccataagaaatttaacattaaagcacaaaaatgaactcgttagaggcatctattgctgggaacttcagtatcaatggtgaattgaagatactgtgtttcgttaccaactcttctgcaccatacatctgactcctccttgaagactagagcatgggcatttttttctttttccttaagggtttaatcctcatatagcacctctaacacctttgatgacattttagtgcttctggatagtaaactgtgtgcctttgactaaatcgactaggagtctagggaagggaggaggtgagcagtttacatttaaatgctccacatatcagcccatctttctttcttggaatttaacccatggctatttactctttcttatgtaagtccaataaacttcctttctataagtagcttagtacagtctttgtttttatcacgatagggaccattatttgtttattaaatagtgatgctgtttcactcataaatatttcagctgtatttctagagaagtaggatggggtttctgggtttaggcttcagtgaagggactttaagtctcttaacccttctttacctcaatcatccatctgaacaaaaaaaatcattatagcctcccctttggggaaactacatagtttaattagtgttttctaataacttacaaatccttagagaaaagttatagtagaagcataagaaattatctttggggttagtttattattattgctattattatcattattactatatgggactagttgtttttttaaattggctacttgaaaatgtgtttcagatctcatggagtgaaatttacctttcatttaccttagggctcaaataagagtatactgaatataaaaatatggaacactaatttctttaaaatacctgaacctattaatagccaggagtgttaacttcgtcacctggaagaagatcctgtcctaacttgaaaatgttagaatgaaaaccttaatcgtctcctctcaaagggtcattgaggaagctgggcttgagtctgtgcagctgttcttcaataatgttatatcattctgaaccaattatcatccttaacccagatttgctttgaatctctgtggcatcttgactactgtctataacaacggtgattgccagacactgcctgatgctcaggtttctatcaatcctcttcttctcctcacagcaggtaggagcttcttggtgttccgctccttacccaggcttgaggaatagtcctactttttgccatgatgccttgctgcagttctggctcttcccttgtgctgttgttctctttgtcatgcaggtttcccagtatcttagtagaagccttgaacaattcctattaccttttcagaccttccttccaagaactgggggatgggggtgttctggtcttgtcacaggtgggtgccacatgtaaggacccactggttcatgggattctttgagagagtctgacgctcacttgtctgggttaaaagtctggtgctgacacctgctttctgaatgactttaagcaagttatttgacttctctttgcctcagtttcctgcctacaaaatgaagataatagcgcctgtcttatcaaggttcttagagaagattagatgcattaacacatgtaaagcacttagaacgctttaagtcacatagtaagcattaataaatatcagttgctaacagcttttgcttctgctctgttaccattttactatctcacctctctcatagcccataacagcaaaccaaactctttggctcttggtagatatattattcttaatgtttgagccctactatttgctattgcttccttttttactcctataatgtgtgaaattgaaataaaaaacagaattgaggccaggcacagcagcttgttcctataattccagtgctttgggaggccaaagtggaaggatcgcttaagcataggagtttgaggctgcagtgggctatgatagcaccactgtactccagcttaggtgacagagcgggaccttgtctcaaaaaaaacaaacaaaaacagaattggtcaccatgatattaaagagccatgaaatatattagcatgtcttttttctgcctatcccctctatcctaaacattccatgtagtcttgggaaataaattctttaaggtaggccagttattatgaatataacatgattatctattgtgttatgtttactgggttgatgccaaggaaaaatgaatatggcaggtcccagcaaataacaacaacaacaaaaatagtattgtctactatttcacagagggtgtggagttagtattgggttttgaaggatgaataggagtttatcagatgaggaggattgagaagagcattcagggcaaaggtatgtggaaaaattggtgtggtagtacacgccaatcctgggaccttcaagttgaacatttaggagtgtagtgtttatgtttcagaagcagaggatgagtggagagggcagcaatagaatggcattaagacccttgtacagtatactaaggagtttggacttaatcctgtgggcatgcaggaccctttgaaagatttgcagtgggaaagtgatcggatctgatttgctaactcattgcaatggctctgtggaagaatatcttggagaggggttcaagacttgagccaggggacatatcaagtagtgtttcaaatgctaactaccccctcctgcttctcacattgctaaatagagtgcagcagaatgaggtgtacttctgaagacaggtttttgaatcagctttccagcagtcccttgagtacattgagagggtgcatggagggaagacatatcatctttaccctgccctctccccatgttaatctattaaaagagatgggagcaaagctgctatcacattgggcttgactgaagacagaagtccttgagcatccttcccctgagtgcgggcaagcctcgtgcttgcagaggagaggagattagaataacatcttcactcttcggtgagagggcaggcagaccctcacactagatggttccaccccggagttcaggcttctcctgacaagtgttgcgagcatctgatgtccttggcctctcttctgcactgcttaccttacagcagttaagcatgagggcattctgtgtcttcctttctttcccttcagttgcttaaagaagatgagaatttgctttaaagaaaaatattaataaatctttataaaatggcattaaatagaaaatctcacactcttttcttcagaatgcttttcttcaattgccattgtatctttttgccccttccaaagtcttaccaattattattaatatatattatcataattacttgtagaaaatcaatagaattgcttgtctttatcagcagtgctacctttctacctctctctcccttttcatcctctcttcgtctcttgcgaattgttgtttctgggggtattattattgtaattacggaaattgataaaaataccatgacaatttcatgcctcagaattattacacagggtttataaaaaaagattattatacatcaatgcagtatttgttattcctaaatgattattccagaaatactaatcaaaaacatctccctgcagaatagtactgtggctttaatatcagctgctgtttctttgaatggggttgcccaatctttcatcaaagaaacacatcacccatatccctgtctttaaaaacagcaattatgtgtaaatgcctcctgatttatttgagccagggccactggccagtatgagtcaccacaatttattgctaaccgtcacttttacatgataggtctgtaacaaatatctgccgcatattgttaaattaatcttccatttaaaattaatggagttagactccccaggttcaatgtaatttcatgttcacgggcagggagggatgtgtgctgcatacaaaatgagacaaggcccaacgccctaatctttcatcaccttgaacctggagactaggacgcgtctcagcaccaactaatgagattgagcctgcgtctctcctgaggatgccggctcaaagaggcttttctgctcagaaatagcaggctctgtcttattttaataattcctcagatatgacaagtctgatgttatgtatgaaagagccaggcttgaaaaagagataaaatgaattttatatcattacttcaaaaccaaaccaagggaagtgtgttgtagttaaattaaaaaaaaaaaaagataggacacattttagtcatgaaatatactgactgtaaaccaggagtcatcctttcatttattttaatgcacaatcaccttagatttctcttctgtaatttttaaacctattcatgcgttaatcaaaataatgtggatgaaagcaggagcttgttcaataaacatttagatgaaaatatcagaggggacatgtaattcctgatggggtatgtcatactgaacctctgaagtcccatcgcttcttttggtggcatcttttgaaaatgcatcttttttctgtgtaccactaacctattactgtttagtctcttagactttaaaaatgcctaagccaaattactcaggggtattgggttctctcgtttttttttctgtctttttcacaaaccaggtaactattttgcatccatggaaaagaaggttttacagaacagatttcggctctcatacatctatagtacttctggcaaatggttgctgtttttttgtttgtttgtttgtttgttttaattcttagggaggactgagccccagagacaatgggacccttttcctaggtaaagaaaacgtctctagaaagacactaagttaagagccaggcaaggtggtgcacacttgtagtcccagctacttggaaggctgtgacagagaattgcttgagcctaggagttcaagaccaatctagacaaacatagcaagacctccagataaggtaaacttcctggtttttaaaaattctgtgagttgagttctgcttcctcagaggggaattctaagtatctgcactttgtgtctgatttatttattttatttttttgagacagggtctcactctgtctcccagtctggagtgcagtggcacgatcttggctcactgcaacctccacctcctaggctcaaacaatcctcccacctcaggagggagctgggactacaggtgcctgccacaacacctggctaattttatatgtttttgtagagacaggatttcatcatgttgcccaggctggtcttgaattcctgggttcaagcaatctgccggcctcagccactgtgcctggcctgtgtctgatttataatacaacatatgattgattttaaagctcttttttgtgatttgttgtaatttgggaccacaataattttttttccaaccccttcttcagacatacataataaaatttctaaagaagtagtattggtattatactacctatagcttttattattattattattattattttactggcattctataacttagaattctattttcttacaatctttgtatatttaaatgaacattagggatagaaaaaatgtaaactctaatacaagaatcaagtatagtcacttaattgacacgtgcagttttaaaaattatagtcaccccttggtatactgagggaattggttccagtaccccctcaccttcacccccatatatattcaagtcctgcagtgggtcctgcagagccctgtgtatgaaaagtcggccctctgtatgtgtgggttttgcatcttttgaatactgtattttaaatctgcatttggttgaaaaaagtctgcatgtaagtggatcaaaacccatgtggttcaagggtcaactgtgtatcactttgataggctatttataagagaagattttaaaaatattgctccatgtctgtacttgaataagatttagaaaatcttaggggtattttagaaccagataaattagtaaaaataatgatactgtaaattggaaaataaatgaataatagtagggcatctttctccatgaacctgaattgctttgctttcctctcttttgatgtctgtaagctgttgcgttttgtacagtgggcctcagggtgcttcgtgagtcccaaataccagatttctttttctctcttctacttatagtatatttgccttaagttcttgatattttcttctgccctcttttcttcttttaatatcttcagcatttttcttcttttttctttctctccctctttccttcccttaaaagggcttctttattttatatagaaactcatctttttttgttttgagacagggtcttgctttgttgctcaggctagagtgcagtagtatgaatcatgactctactgcagtctaaacctccctggctcaagcgatcctcccacctcagcctccaaagtagcctggacctcaggcatgcaccaccatgcccagctaacttttgtatttttttagagacagggttttgccatattgcccaggctggtcttgaactgagctcaagcaatctgcctgcctcagcctcccaaagggctggggttacaggaataagacactgtgcccagccttcaatttttttgttattgttgtgagtgagtgagtgagaaagagagagagagcgcaggttgatatgctcaagcttaaggtctgtaatgggtttaaagctccaagttttataatcggaatggtagagacggaaaggatctctgatctaatccatcctccatttcataggtaatgccatggaggcctgaaaaggttaaggttctcaaagatcaaaaatgtatccttttggaaagtattatagtggttcctcaaaaaaatttaacagataattaccatatatgattcagcagtcacacttctgggtatataatcggaattaaaaacagggacttggacagatacttatattccaatgttcatagaagcattattcataatagctaaaaagtggaaacagtccacatgtatatcagtttgtaaatgaataaataaaatgtggtatatccatagaacagaatattgttgttacttttgtttttgagttgcattttattctgtcactggggctgaagtacagtggcacaatcacacctcgctgcagcctcaaactatggggctcaagaagtcctcctgcctggtactacagacatgagctaccatgctcagcctggaacattattacctagccttaaaaaggatgataattctgacagtctgcaatacgaatgaatcaatgtaatttgaaaacattatgctgattgaaataaactacacacaaaaggataaatattgtgggatttcactgctatgaggtacctagagtagtcaaactcacagagacaaaaagtcaccaggaactgggaagaacagtgggatagggagttacccattcatgggcacaaggtttcattttgggatgatgaaaaagttctgcaaatgaatgttggtgatgattaataatgtgaatactcttaatgccactgaccatatacttaaaaatggttagaatggtaaaaaaaaatttgtatatttgccacaataaaatacacagacactggtatgatttggctctgtccccacccaagtcttatctcaaattttagttcccataatccccatgtgttgtgggagggatctggtggagagaattgaatcatgggggcagtttcccccattctgttcttgtgatagtgagtactcacaaggtctaatcattttataaggggcttttttcttctctgggcactcattcttctctctcctgccaccttgtaaaaaaggatgtgtttgcttccccttctgccatgatcgtaagtttcctgaggcctccccagccatgcagaactgtgagtcacttaagcctctttcctttataaattacccagtcttgggcagttctttatagcagcatgagaacgtattaatacagacacgcacacattcttttattacctgagaaaatttctggcaattagtatgtctgtcctcctctgcctccatctctgtagctaacatttggacattcctctgtttcagtttcagatttgctctcataatgtttttgaatgttacatctttccctttcttatttcagttttctttttttctgacattgagtacgtgctttgtgatagtcactagagatacaaatagctcagaatcaaagaaagagtgtacatgaagtattttcaagaatatgcctataaaatattcaacgatttctcagaaaatatcaattgtaaaataaataaaatacaacaaaactttcttatttgcacaaatgcgtaaagtacatgtagtctaatttaagtagtttttattttttttctctaaagtaaattttgtgactttttttttttttttgagatggagtcttgctctgtcacccaggctggagtgcaatggtgtgtgtgatttcggctcactgcaacctctgcctcccgggttcaagtgattctcccacctcagcctcccgagtagctgggattagaggtcccagctaccacacccaactaatttttgtatttttagtagagatagggttttgccatgttggccaggctggtccctaactcctgaattcaggtgacctgcctgcctcagcctgccaaggtgctgggattacaggtgtgagccactgtgcctggcccaattttgtgaccatttcatataatattataagtattcctttactaaggcaacctgttaatataggtctctcagttgcaggcttttcttattctatggattgactaagaagcccccaaaaatccttatgaggaaagatagagtcatgtgtcataagagaaggctagtaataggcttgagtttcaaagaaaagagtttatcagactgaggagtaaagaacgttggtaactggccttcaaaagatagttaagattgcatccggaaagatgtggggaaggggatgtaaaatggatagcaaggcaggatagcaacagggcattcttggaatagacaaccatccatttgttctcagtgtgaaatatacatggttttgtaatgggaattaaggccgaaatggcatgtcaaggccagtagttgagagctttgtaggtcacattgaagagtttgtatttggagtttgatggactcctaggatggatctgtccagtggacaactggatttcagacctaggagagcctctatagaggtattaattgaagcctttggatgatcgagattgtgaagatagaatataagacagagcctcttgagcatttctcccttagtgagaagaaggtggtgatacacagaaggaaccttcagcaaggtgagaatgatagataaaggatggactttccccaagaaacctggcaagggagtgatcaggagtgttaatactgtcacagagactttaaagaggatcacaaatgaggggaaaccttggattttaatcttgactcttagtactcaaggaaactgcatgttaagatgtggtaattaaagtattaaaatattctaagggtcccttgcactctccctttctgtgcccattgtgacagcatggtcacatcattgcttgaggcatgcaagagtgctttattgaagatagtattacggggggagattttattttgatagagagtaacaaatagactaataatctatcttaaagtaagtatcttaaagtcagtaggcaaaggagaaaaaaagatattgataaggaaagcatctgcaggacagattctagatttctgttttttgttgttgtgtatgtcagggcccagactatgtaaatgatagggcaaaatgtgagtagcaacatagtcttattagaaacctaaatatctacaaagagagcaaaaaactatcaagtcaagaatatgttacccattttagtaaaaaggttagatttcatttgccttgtgtatttgtgtgtgtgtgtgtgtgtgtgtatgtatgtatgtgtgtgtgtgtgtgtgtgtgtgtatgacagtactgtattaggaatgcttagtaggcatttggagaagttttgggtgattggtaacatgaaccattcttccctttaatctggtgcatctgaacatattcctgggcagaaggtatacctgtgcacattacagacgtttgtgggtacttttatttcattatcctcaagcaagaatacgagattgctatattctacattagaccaacttgttcttagcaagcacagaataataacctttcagtgtgaatgtttgtacataatagtagtaggatgtattttgtggtattttttaaatgaggattcattttaggcttggcacagtggctcacgcctataatcccagcactttgggaggctgaggcaggaggatcgcttgattgagcccaggagtttgaagccagcctgggcaacatagtaaaacttcatctctacgaaaagtacaaaaattagctgggtgtagtggcacatacctgtggtcccagctacttgggaggctgaggtgggaggcttgagcctgggtggtggaggctgagtgagtgagagtgtgtcactgcactccagcctgggtgacagagtaagacagtctctcaaaaacatacatacatacatacatacatacatacatacatacatacatatgtacatgcatacatacatgcatacaaatgaggattcactttaaaaagcattgaaatgtaaatatcagctatacctgaatgtttataatttaaaggtaagattgtcattaaaggaaaccttaggaatttctcagacatactgaaaatcagcccgaaagtgttttctgttgtttggttgttgtcgttcttttaggattttatggagtactctcattacttatcacttagaccaaaagagaatgtcaaactgccaacaaagttgttttttctacatttctactaaataatgttaagtagtcaggttcatctttggaaggaagattcttaagtgctttggcctccagtagtttagatgagacttcttaaaactcaaaatcattttattggaaaatgctttattttctgtctttgtgaattatatttataataatgcatttaatttaggccttgggattttgtatacctttgggtgggcctcttcctcttctccccctgcatctctaataagcactgaatatcaaattgaaaccatgatattctgaaatcggaaagtttctgccttttgcagcttatttgatgggaataaaaatgactgatggcactctctcttggacccttttgttcaactcacctatgattatggagcctattagctggagttacaacctatttaagagcagtgcttaccagtaatgggggccaaatgattttggaaagttcagatgtactggactccctgcagaaatgaattcagcactgaacatattgatgcagaacccgaacgaggctactccagtgggacaaagagaattgtgagctctgcaagaaatgagtgggtagtagaattaaagatcagatagatgttcggctcaagggcagtctcagctcttaagttcatcacagcaatttaatcaggcccaaatgagcgttgcccagaaaggaatcagccttcggtgtgacaggaaatggagtttatttaaaagattctttgtttctagtaattgtgtgttaaggttttccaagtctacactaaaattacggaactactacatttgataggtgatagcactttggtttaccttggttcagaagatgtactgttgagaagatttatacaagtcatgatcttgtccagaaggagcctgccacctcaaaagttccagctctatcgtcttttggattaagtaggccagagtgcatctttggctatagctatctgatgcccccttccattgtaaaattattttcacaaaaatatatttgtctacagtaagagttatataatatagcagtaaagaccacaaactttagaatgaggcacacctgggttggaatcccacctcctccacttgttagctatatgaccttgagcaaattacaactgtagttgaacacatagttctttacttacgaaatgagaataataattcctgcctcacaagattatggggagaggtcaattaaatgatgtagtatgtatcagttgcttcacaatgtctgcacataataagggctcaataaatagtagttacagctctagagctctctcatcttgtccctcacctcatttgcccactcctctactctcttcatgagccagagtgttcactgctttaggaataagtgagggaaactttttttttcttttttctttctttcttttttttttttttttccgagacagagtctcgctctgtccccaggctggagtgcagtggcacgatgtcagctcactgcaacttctgcctcccgggttcaagcgattctcatgcctcagcctcctgagtagctgggattataggtgcccgccaccatgcccggctgatttttttttttttttttttgtatttttagcagagacagggtttcaccatgttggtcaggctagtctcgatcttttgaccttgtgatccacctgcctcggcctcgtaaagtgctgggattacaggcgtgagccactgtgcccggccaaataagggaaactttttagaggatctttggcttcagtcatggagaaaaagaagaaactataaacacttggaggtctgaacagttcattgattgttaagaacccaaacaaaaacactccgtccccaaccccgacacaacaatacagtggggtattttggattgacacattattagcctggaaacctatattgacagccaggttatgattttacacatgtaataagaagagtctattggtttttcttctttgttgctcactagttcttaagtttgctcactaatgtataggtatttttgtctaacactgacaaaatttgaaaagaagtataataaatttattaggattttacttctctccttcatggacctggcaaatagtgtatctatgtctccatacccatatccacgttcttattttttttatctgtatctattatctgtctctgtgtgtgtggaaagtgataatgaatgaatgaatgaatgataaaagatccaaactatgaactttatggatatcggggtaaacatccaacaatcccttaaatttggtgcactcaagtaaaagctgaactggagagagttgaccagatcctcttaaagttaagctttttatccctctgcccataatttgtaccttgagatcctatagggatgtgcctaggcctgtgtgaatggcagcctcatctatgctgtacctgcagtacagaccagcctcatctgtgctttacctgtaatacagagcgaaacatatctagagaaagagattagtttgcaattagggggatcccacccattccacagcttggcccagtggaggttccctgctttgatcgtctcttggtgaagagaagaagagacagcaagtgctgtagaaagttttcttctttgtagttaaagtgatagggtggaaacaggagcatagaaaagacattcagagaatagaaagtgaccaaccatttgaaaacctaaaggaagacctgggttcaaacatttgttaacatacagagaagaaaaatatgatctgtttggggtattacaatccagtgtgtattttctatcatacttaccaaatgtacttacttgttgtaaacatttaatatttgtttagtgctttgaagattcggagtaatgtttcagatctacatattgtatcaataagcaaataacatatgctaagcacttaaaggctattgtcattctccagctagtacagagcaaatgtgaaagggtaaagactatgtaatttcaggtgcggtttcagtgaggaagccagaacagcagtctactcttatctgctgctttcttccaccccaaccccctgacccataacaacaaaaatcaaacccagaacaaaccgcatagattgatcaaagagcataacatgcattgttaggatttcagatatgtagacagaaagtcagattaagctttaatgataattttgagttcttggagcaatgctcattgattacaatgtgtgtgtgctggggagcaatatttggggtacccataccttccctgggcatgttaaccttgtggggcttgccttgtttcagaacatgtttcctattaaaaaaagatgactgtaaaatcgtaggccttttctagcatgcacctcaaaactcttccagcctctacccatcacccagttccaaagccacttctgcttccacattttagttatttgttacagcagtaccctcccttcttggtaccagtttttgtcttagtccactcaggctgctataacaaaataccaaaaactaggtagcttataaacaacagaaatttatttctgacagttgtggaggctgggaattacaagatcaagatgctggcaggttcactgtcttgtgaggcctagtttctggttgtagatggcaccttctagctgtgtcctttacatggtagaaggggtacacgagctcctagggccttttttctaaaggcactaattcactcatgaaggcttcaccctcatgacctaaccacctccactaaaggcccacctcctaataccatcaccttggtagttaggatttcaacatgtagattttgagtggacataaacattcagaccacagtccctgtgaagaaggtatttgttattctggcagtgcaggagcaagctagcacacttgccatatttagctgatagaagtaatgtgaaatgaaccgttaggaggagggattttgtggaagaaggaatggcggactgagcaagataaaatatggagaattgctccctcttcaagaaacgcctccatcctgatgtatatcagctttcatatccccatggatattttacaggcattgctacctctttaaacatttatgctattaaaaaaatcagaccaattgttgacataaagctaacatagcagcttctatatagacagaatatgaattttttatgctgttgatgagaagtttatgtcatttatatactatagtagggtagaagatggatttggaatcctgaaaaagctactgtttgtaccattcagaatattagcttgtgctttgaatcgaaatattaagatacctgtattgtcaatgtgagtgtttctgtgcaaagtggcttacatatgggtggaatgggagaaattgctctacctggagaaaatagcaatagttttctttcgtttatgttttgttttgtgaaaggaagggttaatagcatttaatacctgatttatctgtgcttctctgcaccattaaaagaatgaactgttgtggtaataaaaccatatttcattgaattaaaagtgccatcacttgcaagatgcaacattattttatgtacctctaaaaaactacactaacaaactgacatgtcaaactgacatgccattgatgttaagatgcattccaatttcagagatgtaaatatactttaaaatgtatatcttggaatcaatgaaatactgcatatagttcttttgtggtatgtgtatatatgtatgtatacacacacatatatacatatgccacaagagaataaagtatacttctatttggttatagtctataatattttgaatcattttactgagttaggttttacttattttttaaagttgctgttgacatctgtttgataccattcatttaacatggcatgaatttagaatctctacttagaatagtcctttggaagccctagtttgttgagttttcaaaagaaaaaagagtctggtgcaaggaggcagactgacattcaagtcagatcattttttaaaaaaggaaagaaaggagggagggaggaaggaagaaaggaaggaagaggttcatcctgtcagttaggaaccagctatcttacttttcaaagacaaaatcagatcatactagtatatcacaatcccgtagtttatctaattgcatatttataattcttcttggatggtgtctctcatcttggattacctctctcacccaaaatcatattttattttgttttgtcattataaaatttactatatgatcattgcaaaacaaaaacaaaaaattaccagtacatataacaatactggatgtcatatattaagttcacaataaattatggcgatttttccacatcaataccttatcttcatgtttcacatcaatacataatcttaatttttagtgactgcatattatatcattgtatagtaaaacataatttttaaccatttccctattgatggacatttagattggttgcagtttatcactttaatggcatggctgccatgtactttctttttgtcacacttacccagtgatcattttaggatcaattcctagcaatttctggattgctggatcaaaggctctgtcttcatgttattatgtgttgggaagggaccatttcctcatctgttcaccaatacaggatatcagccatctcccaccccaccccatctttacctacttgattggttaaaaaaaaaatctatttttgtttttattagcatttttaaaattgtagttgaggttgaacaccttttcatatgttttggccttttcagagtggttcttgataatagaaagcacagcaggtcagagagcaaaaggtcttaatgaacttccattctgcttcacagaagcctatgaggttttgaggtaactttctcaagttcgttataaagaagatgaaactgatagaaaataactgtgatgtagagatggggtctggcccactttcagctggtctactctccagcactggaaaggaagactgagcatcagaaagccagggaagatccctccagaggtccaggattgttctgaggaatactgaaatcaaaaactctagactccttcctgctttctgagatgcagggatttgacagagaggtcaaaaaagggcccctttcctctgcatgtgcagcttttatttactattgtttcctttttgttgtattgaaatgtcttcattgcttgcctttatggatacaaataaccggatactgtaatttgaaagtagttaacaatgaaactgcatagtatgagccatgctgatttttttttttagtgggcaaatggggtgatttctctatgagcctctctgctgtcagaagctcttaacatttgagtcaacatgggaattatatttggaataaattagtaaattcccattcagcatgcctataccatgtaatcttcaggaaccgtaatgactgtgtagtagagtatatttccaacttggtatttataaaacacatttgctctgagaaacccttcagtatttgttcctcaaggcccagccctcatgctgcctcctttgttagtcagtgtttattttgtaatagttgggacagtgttgtacagtggaaacccatttgtctttggagttagcccagacataaatggactcttaggcctgctatttactagcagtattctcatgtttggaaatcaggagcaatgtaattgttgagacaatttattttaatgagagtaagtcatgcagtaagcatcaatcttagcacatatacatgttgtctttttttgtctccctgaaatcttcttcagctgcttccatgtactgatatcttcttccaaattccttaagagccttcatctgggtcatacattgacatttatttgatacttaatattgatagttatctcttgatgtttgtgtatgtctttgtatccataggatcctccattagcacatgtattcattcatcaaatatttattgagccacttctgtatattaggcatagagtaagatgctggaatatgttaatgaacaggagatgtggtcactgtgccctcctaatgcttacatcccagcaggcaagacctatatgaaacaaagtttgaattactaaatgaaagacatggcagttgctattagcaatgttgtaaggggctgtgaatgtagactagcttgtacatgacatttgagctgatatctattggctgagtaagagttagccaggtagaggtgggagtgataagtctttaggcagagaaagcagcacgttcaaagactctgaaacaggaaaggacttgtttcagtggtgcaatagaggatgagcaaaatgttctcagagaatggagtgcagaaagcaggccttcagagaggtcattggcagcgtaaaaatggggtaagaacggcaaccttgtgcagggtcttgaaggccaggtgtaggttccagtctgtcacctgagagcaacaggaagatactgaagggttaaaggtttacctgtggaagagtatcagtaaaacataaatggatagattctaagtgagtctactttaagctggagtttggagtcgcagggtcctgcgtgtgtaccaccatactctctacacttttaaaactaaaacagaaagtattctaaaacataaaacaaaactggattgtattttcaactgttccttcaactctgaaatactatgattatgctagagtatgagaaattttattttccaaacaaatataaagatgtatttctgatgaaaaacattttcaacctaagctaaaaggaaatctaatgaaaactttaaggatcctttaaaatactaatattgtgtttaaagagaaaatgatacttgtctttaaaatgttttaaaacatttaaaatatgctactgaatataagtgaagagtggtagatcctaaagtagtatttcttagaagagtagaataggttatttccaaaatctttttcatggaattttagtgaaagctaccatagggatcatgttgtccagcctctttgtccttataaaaacatcaatatcttcataaatcaagaaaatgagtcccaaaattggacacatgagctacccattttctaagattttgctgaacggaactttgatcataggggtctctttctaaggcaacgtattagaaactcccagcatcactgtattccttataagaatcatattttttacattaatctccagaatcaaactacaagacaattaagttgttgcttttaccaggttgaaacttgccttgatttactatgaatgttggttgccttgatttcttctactttttgtctcagttctacatgttgttgttcttctggttttgctccttatgagattcgctggatctctgtatctcttcaactgtggtgagtttcatggacagggtcagaacttagggaaatgttgagaatagggtgtggtcctatgatgggtcctcctcttcttacaccttcgactgttgtaccactctttgatgttacaaagatgaatgacttgtggtccttggcccagagtttcatattctggataaattattatttatttgtagtgtacttctatatttttacatgctgtcagaatattagaaatacagtgtttcctgtcagaaatgccagctgagcaaaagccagtaagtcagatactaatgaatggattagcaaattatagggactaatgaaattaaataaagattattcaactaaactagtggctcctcccagtagtttagagcgttgctgaccaccttctttttgtccactcacatattagaattaaaaatgtcaaagtaaaattaaaataacattctcacctacaagaggtagggagaaggaaagtaatatttatctttaatgttattttcagttgtgcatttattatgtatatttttgcataaaataacttgtagtttttgtttggacaagccaatcaaatgagtctttaagatgaagaaggagagcgaacccacaagagatgagtttcgtatgtcttctcaaaaaaaaaaaaaaatttttttttagctcaccaaaaaatgttatgaaatgagaattttgaaaccttacctgtggaaatcacagtggtaatacttatatttcagcccttagatattcccagtggtgttttgatcttagatattcccccaaaggtgttgattagattctggctacagctgaaggaagagaatttttgctttttagctgaatagtaaaacaagcctctaaagatatgaggcatgggggaaaaaaactaaaggcttcttcaaggtggtgtaagggcataatttttgtcatctttattttaagagctctaccaggccagacgcggtgactcacgcctgtaatcccagcactttgggaggccgaggcgagtggatcacgaggtcaggatattgagaccacggtgaaaccccatctctactaaaaatacaaaaaaaattagccaggcatggtggcgggtgcctgtagtcccagctactcaggaggctgaggcaggaaaatggcgtgaacccgggaggcggaggttgcagtgagcccagatcgtgccactgcactccagcctgggcgacagagcaagactccgtctcaaaaaacaaaaaaaaagctttgccaaaggtttccccttagtaaagaatttaatacttgaagtcatcagattagatttcagacttcatttacccgctctatgcatttttttcgtcttcctgggtttggtctgcctgtgcttcttagtctacaggtgtcttttctctgtactgccaacctctaattggagatttattaggtgctcttaagtaagagaggaggaaggccaaaggagacagaaaatggagaagcaagaagaaactgatcaaggcaggagagggaggaactggagaggatggagataaaagatgtataaatgaagacaaatggaagaacaatgagatagagaggcctgaatggtagaaaaattctaaaactgagctagtgagaatgcatataaaataggggtctggtagaagaacttcagcaaaagtggtgtaaatcaatgatgagtaaattaatagggcaattgtgcaaatgggactcactcatttatactaagcgtaatacatcatgaatgatttagagataatgcaacccgtagggcataccttttaatctacccaggacccggtagagaatgctgtcacttcaagagtaaaaaggcagaggatcagaatattgggtgtgtctcttcattctaacagtgttaatgagatagattctgagcaacatgaaaattaaccagactcacaagcttagtttgtgatttatagattgaaaagaagcttaatatattccaaacatcttcctacaaacccaaaatatttaagtgttttgaaagtattcatttgaataggttaacatgtgtgattgccatggatggaaatgaaagtaaaatgagtcactgcacatatgatccaaggaacatctgagtgttaagtgggttgtaactgcataagaatccagtgctattggaagatgcatcagagtattctgagaccagggaataaaattctcttccatgtgctcccttctctttcattcgtgtgcctattcactcaccattcaataggtgtctatcgacagccttctgtgtggaaggtactgaggaatgtcctatgggttgctgcttctacctgaaacagaaacataagatttacatccctcaggccctcttaccagtatttttatgggaggatattgaggaagggaagggagaaagtgaatataagaagtggagagaagtcttggtttatagagctgttagggttccaagtctgctgttctttcttgattcagaaatggaagctcacaaaggttgtgtctggaccaaagacccaagatagttggagtgttgaggattagatgattttgggcttcccttctagttcattcttagaatttattcccagtttttgtgtttatgaaagttagagatacagtcttcaaccattaggagttagaggtgaaaataatagtaattggatgttaccaagtatgtaaacacttgtagggaagggaaatacataaataactaaattctctattaaattctgattctgaaaacttcaaaacagacctaatttagtaagaggggctgcatttttatatgtgatcccacagaatgcttctagacttctgtcactgatggggaaaaatcaaattattcaaagtcttgcaccatataacaaaaaagctaaactaagacgagatttcagggagtatagaaaccagcaatttgtgaaaaatcttgtgtatgaagagtcatgatgtagaacattcaaacaaatggatcacaagagatttctcaaagcatgtcttagaggtgagcaggcaggcatcaattttaaaattctctgttataaatgatcataagcttatgtttttctgtgtaaaggagaaataatttcccaattttataaaacaaattaccaatgatgtaaaaaaaacatttagcacagtattatatcagagggcatttaacattcttttgaatcatttgagattttcatgtttccatttcagagatcagggaagatgtgccttggagaggaagcatgtcttaaatctggaaatgatatgaagagggatgtcagcaacacttcatcctgggccagtaatagggagagtttcttttctctcgtcaaattgcttaaaggattctagttccgtttggtgtggtcactcacatttgaattctaatactctatgtgatatagattctgttgactactgttagcgtgaccccaatgagaaattaaacacttccctccttttcatttgcagtgtgttttagtttaaccttcatttgtttctcttttctccattcctcatcccaattcaggtatcagatcctttgacaattgttaacctgcccagctgggatttttggcattaagctatgactgtaacgtttctactaataaattagattttttaaaagagtgctgcttgccaagaagcaaagtcattacatagtgtgtatatgttcaatgtatggctataaaagtctccttagccaaacataatcgacagttaaaataaatttaaaataaccgtgctacctctagattttaaaattgttaaggtgaagataggtggtctaattttactctatttccatttttcttattcacagggtatatttgttctgtaaaaccacatatgtatcttatagtctgcagctgatgtatttatctgcctaaatacacatttctccaatggaatattctgtaatatcaagcatttcttttttagatggaaattaattttataacagttgaacatcatctttgtcaatcagcagctttatctaccataaagaacaaaaacgtacttggcgtggcctgctttaacttttgtagttcctatgtttaaactgaacagaggaatattatgtgaacaaattggaaaattatataaagaaataaaaatctttttactattatagttatctttaccccatagctttcaaaaaggcatttgaagcaatttaataaaataggaataacagtaagtactagatgtgagaggtgagaaaacaactttgtaaatcacccatctcacgaagttgcacagaggttcctgatagcccagacaatgaaataatgtgataattcctattttcagaaaagataactagctccttattttgttttgggtgtagaatgggggaagtggtatatttttgctaagttctaaattcttaggaaaatgttcacatgggttttgagagtcactgtataactgacaatgtccccagttacagatttccagaaaattcagacatggaattcatgttactcattttagttctaacctttgatgaaagattagggcattagattgaagcttaagtaagcaaaggcattcttcaggtgatgtggttcattctaatcagtaattttatgatggtgttcatattccattccaatgatcaaatggactagtaagcttgagaaataagacaaactagagagagagattattttataaatatgaaggaggctagtgaaattttggtccagatggaaagccacccactctcccaggtcaggactgcatagatgaagtataagcaaaaccgtcattcacactttgaaggtgctgctttagagagatgtcattatatgtggtgtcagatttttcaccctgttcagtactgggcactgatttttaaaaccacttatctatattttttaaatgtcttctgactcattggattgattttgtggacctactggtagtctttggatatcccccagttaatctttgcttccatgatgagcatttattgaattctattcttatgccaggcactgtactagattttaggagtacagtagtcaggttttccttgccttcatggagtctctggtcaaatactttggttcttatatagcggttcatgttccgacacgtggttacccacacaggctttagttaacatctgcatcacctgctgcacattctcatctaaaatgcgtatgtgaaagtacagttgtagccactcagtgtcactcaccagtggggctttaggcctgagactttccgatagcctctaattatgtaaaaccatgcctgtattcaggagtcagaagtgatcaaaatgttttaggaagcacaccgtcagcatagatgtgtcaactcagcagcaagatttttcattcttttaaagttacacatttcataaagaagaagggtatcagtgtaaacttctaaatgcaggacaaaatgcatgattggggatggagattggagtggacttgttcaaagagcagcagcaaatgagacattaaaggaatacataggaagccacttccaagtacttccatttttctttagttgtgattgtgagatggttccctactagttagagaaggaaaattttaaaatgctttgctaaacagatgatccttaaattggtcactgtataccgtgatgcagcctaatcaaaatggtattcctttgagtgagtgagccacagagactctcgccaaccccttgtgcagctttctattaacagtataaatactccattgttgtaaagcagtttatggttaacaaagcgctgtcacagacacgttatcttagttttgcagattgcctttgtacatgttattctcatttcctagcatgccctctatccctgctttgcctgcttagcaagctcattcttatccttcaggacataacaccaactctgcaaagtcctcttgagacccttctgagcaggtagatggtcccttccccgtacttacacaagccctgatctcatctctgttgtcatttgttcacatcactgtttctccctggagactgagtctctcaagggtaaggacactgtgtgctcttcatttttcttcccagtgcctttgtaaccagtcttcctgggggatactttgtaagtaaaggtgaatactgtatggtgtgcagcttaggagagcttaagccacttcctaagttaagatactaagtagtagataagagtaaaacttaagtgtcttaactcctgtttttatcggtttttctggtttatcagtttattgctcatctgaaaacaagctgtccacatcatactcatgctgttctacctgtcagagatatattacatggtaaatgtgagtgataaaggaggataagttctttgtcagaatgaggacatttcggttctgtcatcatgcctgaaatgcatgatttcacatgatttccatgtgaaataaaacattggtataaaagggatatggacaaatttgtggatgttagaaccacacctttttctctgaatttattttcttctcactcctacttggcatattccctgtcattgtttgagagtgtgcaccaatgtcctcgtctcagggacaccatttctttcccgctattagagtgtctggatgatgccgtacccttagtgcactgtcctgttgaaaatttggtacattagttattttaaggtttaaaaacattgctgcctacataatattccacctctttggagcatttgcattggagtgaccagtggcttgaagctctgtatggtggagtgactgatggtagttgaagactgcaaaagtaggtatctgagggctggaaggcattcctggcacccctaaaactaccccactgggggccatccaagcctgtgattaacaaaccctagttatttgctaggtagtttccacatggcatagtaggatatatatatgtgaggcacaatacagtgtttatgtgagaataatatagattatttgaatctaggctgcagaacctacctgaaaatgggttttacagttttgtgtaattgccttttctttgtgtttgcatagaaggcattgcatagctggaagatgatggcaattataatttattatgctgtaattgttacctaaatgtttttgaataagcaaaaatcacatctgtttaggaataagttgcacagcaagagaattccctttgaaatgaataccgtgttctcatattctgtaactgtacacataaaacaacatatttatttccccactgagtccattacattcccaagtcaaactgcatcctctcttcctttcccatattaaaccctttgatttaatggaggttttaactactggttctttagggaattttcagtaggctttgcacagattaggttattggaaagtatagttatttgcttgtaaagtggcagttctgtgtcaaaattgcttttctctggagctgcaacagtaaaaacgataagcttctgctttgcatccaaaatgccctgatgttcctagcatgatcgtttttcctttgcttcttgctcagcaccattcggtcacaggctggtttggacaggcgaatatgagcacatgtagcccagaggactttgatatccagtggtgataatagacaaggcctgtcttccattctggttgccactggtctgtgacaaccagtgttccgggcatggtgagcatagtgctgcttcccttctccgttaaataggaaatgcataagcctggagtcgttttgtttgttccacagaaacgtagcagttgaaataattgccttgccatgcccaggctaacaggatttatcttccattatagatcatgaagacataggcaagaatagtttactcctctaaatttactaggctactcacttcgaaatgatttcactgtgtaaaagagaacagtcctagctgtggcttagcctagaaaggctttgatacctagaaagatgaagggcagaagtgtattctctatttttctgctcccagctcataaaatagaattggagtttatgtaaatagcagatagcctgattttattttttatgccccagttgcaagttagtgtctccttaagatgggtcttaatcactgacgttgtgtgcttccattcagcacctatctgtctattaagtggcattctagtggcctccaagagttgagtactttattctgatcagagtcagcctgggtgaccaagatgggctgtatcaatctgttacacctcagacccactggaggccacaatctttgagtgtcttttggaagatactgtcctatgttgttctagaatgctgactcctactgcttaaacctccgttctctctctgtttttatcttaggccagatgtcctttataaattttgattttttgttttttgggttttgtttttggagtttggatctcttagttttcatcctgaatactgttccacactgcatatttaatcagttaaatcttggtctcctggctttgaccatcaaatgttactctattgcctcaactctattgagttactccaactcaactgctcccacctcagggtctttcactacccattcataggcagtagccccttgtttctcttcttcgtgaaacctgagttttccttattgtacttatctcaggcattaatggatctgtgaagaagtatgacgttaagcttaaaggatcaaaaactgggcttccctatgtatgtttcaagtttcatttgtgtgaccaagagagttcatagtatagatttgaagagttcaatcaagaagctaagatattaactcatcttagtaatagccttttgtctacttcatccatctgcccatctgtctgtcaatctgtatacattattgataacttccaatgttgtaaacactgggaataccaaaaaaaaaagaatgagccatgcacctttccttcgtaatgactacattaaagccccaagacatgaagctacttgctgagccttgcagctgacctgtggcatagtggagactagaacccatttctagagggatcttcctcatacttcccaaggtcagttctctttaggcctttggtattcctgtcttagttgttgtaagagtagatttcgactcatcaaacatttgtgatttggaagtatcgcatagttgaagaattgaagaaagctgatgggaacaaagtcattttcaagtttacttgagcacatagatatcatgttgactactttgctgaatattcagaatcatttatatttagtatagtaaaagtgaaaagtatctgtttttaaaatttggaaaacacacgaaatacaatgaagaaaactaaagtaacaaccattttactactctttttatgtatttcctttgagtagatatcaaatatatcagcattttcagcatatacgtacagttttgtgtcctgcctttttcccttcaactatataatcagcatcttcccacatcgtgagatgtgaattttttgaaaacatgataattaatgcaatatgttatttcaaagtaaaaactttttatttaactattattgtgtgtgtaactttattttctgtgtttaggttgtttctgatttttcacccttatcaaccatgctgaggcatgaacttcctattaataaatcattgtgtacatctgtcagtatttccttaggataaatttcttttagttctattactgcatctgaggaaattaacatatcaaagctattgatatgtatttccctgggtatacatttttttttttttttttttgagacagtgtcttgctctgtcacccaggctggagttcagtggtgttatcacagctcgctgcagcctggactgcttgggctcaagtgattctcccaccttagcctcctgagtagctgggaccacaggtgtgcaccataatgcctgactttttttttttttttttttcaatttatagagacaaggtctcactatgttgcccaggctggtttcgaacttttggactcaagccatcctcccaccttgacctcccaaacttctgggattacagatgtaagctgctatgctaggcctcccagggtatacttttaaccctgccttacaccacccagaattcaaagcatggaatccttgacccagtagccagagtatttcttatcttaagtttaggaaagactactctgtggtcaaatgtagtcacagaatttctttccaacaaagctgtctacgtagttaactgagaaccgtctccaaagggttgttcctcttgagggaggtttcagagaagagatggcattgatgtaagtcttgaagaagttagagctcaaaatattgtgaagaggaagataatttttttttttttttttttatcgagacagagtctcgctctgtcacccagactggagtgcagtgacgcatctcggcccactgcaagctctgcctcccgggttcacgccattctcctgccccagcctcccaagtagctgggactacaggcgcctgccaccacacccgggtaatttttttttttatatttgtagtagagatggggtttcaccgtgttagccaggatagtctcgatctcctgacctcgtgatcctcccgcctcagcctcccaaagtgttgggattacaggcgtgagccaccacacctgaacgatgaatttttctaccaggacaaacaggatgttcagaaggaagacattgttagaactgtacataatcttagacatcatctatcccagtggtttatcaaatattttcacagacaaaacattttttcaagccaaatcttgtctagagtactacaaactgattgaagtgaaatgtctccagttaaatcacagtggatgggagagctcggaattgagggtagaacctcctttgctcagctttcttagagcttcctatgcacctgaaaaacccaaagcctctttttttggttttttttgggttttttttgttttgttttttgagacggaatctcacttttttgctgaggctggagtgcagtggcactgtgtcagctcactgcaacctctgtctcctggattcaagcaattcttctgcctcagcctcccgagtagctgggattacaggcggccaccaccacgcccagctagtttttatatttttagtagagatggggtttcaccatgttggccagactggtctcgaactcctgaccttaggtgatccacccacctcagccccgcaaagtgctgggattccaggtgtaagccactgcacctggcccaaagtctctttaaaaaacaaattttaagtcactccagtttgaagtttaggacacagagacaaactgtgactttcctcaaggtcagtcagaagtgattctgaaaccacctttcagtactttaaccctgtccaaaagcagccattttagtgcttttatcactagatgttcccatgcaggttgagagagattatttctgttctgttaggttatgcattgttgcagtgtcccaagagataaagtcccaagatattaatgtaagtattagcttctgtaagatgttaccccaatccatattaaccatgtctggctgaggcatgaaggatctattaaattatatccaggttcctattaaatcactacactggcagtaatacctgggctcaccttctccttaacccaaattaacacatgctgttagtggtctcaagtctaaggcaagttcctgagatgaacaagtgactgggaaaacaggagaggagaaaattaaaataaatgataggctgaccttctcacaccacttgtggtttctcaattaaccaaaagccagacagctccacgttgctgttctctcagtaataggtttcaccctcccatttaatgccagcccacacgggtgcacacacagacacacactttgctaatcagattggcagcaaatagaattaaaccattaaggcaattaagcaattcttagataacatttgatcagttcaatgaaaatgcaaattcattcttcttttggagaaataagttgatggaaagtcatttcgtgttctataatcataattaactcttttccaaataaagattgcaatgttttgggcttggagctacacagatggaaatgatttttttcattttttgcttcactctgttcatccttttgtaatgcaccatgtttttctgcctccagactctttgggacatttaggtcatcttacctacaatctcttccttgtgcctcaaggcaaactctgttatttactctcacacatgatgactcatgcattaaacacctccttagaccctgagttcggaatagatcctacagcattctggaatgattttggtcggatattcatgtgttgtagatgcactacttggctgcttctcatttctctctattccccacacttacggtttctcctctctcacaagctggtggggaagagaatgttgcacccaaaaataggtgcttgaaaatgagcgtgtggtgtctgcattttcatttctagattggtatcattgaagcctacgttccattctgccaccacagcctgaactttcagcaagaaaatgatgagcaccttgcagcccgtgcttccctcacctgccaaggtgcctttgtgctctagctcagggtttccaaacctggtacatcatcagctggggacatttggaaatatttatagtccacagggttttaatccagacctatagaatcggtatgtcccaggtttggcttagggattttcttttgcttttgtttttttcctttaaaaaaaaaaaaatctttctgtttgataatagggatcagccagtcttaagtctagatgccattttttttctacattggagaccataacatgtagtctgatgcatgatctgtcaatgacacagaaatcacttggatccaaagaattttatgatagccttgcttataaagaaaaataacaccttatgtggcaggtcattttatagatacacacatatgaatagtccactgcatcatgcgtgtgtatatgtgtatatcaagtgtctttagaggtaggtaaaacataagaggcagctgttatcacctagggcaggggtgtccaatcttttggcttccttgggctacattggaagaagaattgtcttaggccacgcataaaatacagtaacactaacgatagctgatgagctagaaaaataataataataatggcagaaacatctcaaaatgttttaacaaagtttacaaatttgttgggccacattcagagctgtcctgagccacgtgcgggctgcgggttccacaagcttggcctagctagatattatatttaatgtatctccttttcagtcttaataaagtattgcagccaactcccatccagcaggacacatggacttagtgtgcctacctgcaggtttttgagcatgaatgtaaatattaatagaaaaattgtgaatgcttctcaggaatgtcaccagtgatttttttcccccaaagaaacctttagttttgctaatccctttactagtacatgtttgtagaacacatctttttgagaattttttggggatactgatcagctactattaaagccatcaagccagcggtgccaccagtgtcacaaggaagaacgatgttttgggaagggattgagctcagcattccaggaaatattttttacctattcattactgcatgcataggcttacattttctcaatttaaaaatacttctaaagggtgggcttttgggatgtagacacataatgttctcagcaatactgtaaagcctcattaatttgctaaacaaataagtgagatggtaaaggatattgcatagattgtaagggcacatttaatcatctgaggtttaactggctctaaaggcaacaccttttcaagctcttaagagtctatatttacatggatagtaggtcttcttccttcattaaacttgccctctaagaccttttagctgttagttagaattacattttgaacttcaggataattctatatttctttcttaaaataaattctttatatgagcatttagaccataattcaaactgaggtttcctataagttctgtgttatattttatttgcgtgcatagtgatattcataccacatctgttaaagtatgaagggaggaaaatgtcagcaagtgtattgtgtctctgctcacaataattttccaatgaaagttcacttaaatgagggattcatatatattaaggactgttgttggtgattagtacataaaaatgtgggtttttctcataagtggttttaaaacttcagactgagtacctcttttgtttaatttttgcacttcttggaggcataaggtattttagtatgtgtggatcttttttattgagtttgcatagtttaggagttttttggcttaaaataaaatagggaaaaaaagctctcttaaaatagtatcctttcttgaacccataaagtagggctttgaagacgtgcaacatttgtgaggttctaaagaggggattttgtggtgttctttccagtgcttccttccttccgtcctcaccaccctgctgtaatctgataacaaataactttccagtcagtcaatttaaattatatgtaggctgcaattttttaaaatttcataatggatgctatttaaacacaaacatacatttaaaaaaaatgccatactaaagtccaaaaggaatggtgacagacattttatttatttagagacaagttctcgccctgtcacccaggatacagtggtgtgatcttggctcactgcaacttctgcctcccaggctcaagcaatcctcccacctcagcctcccaagtagctgggaccacaagtgtgcaccacgatgcctgtgttttgttttttgtggtttttttttttggtattttttgtagaggcgcattctcgccatattgcccaggcttatctggaactcctgagctcaagctgtctgcccaccgcacccagctgacattttaaatatttatttatagagcttcattatttgtacagtgcccttaaagccaaaggcattgattaggcttatagaaattgcaattaggccatgcacagtggctcatgcttgtaatcccagcactttgggaggccaacgtgggaggatcgcttgagctgaggagttcgagactagcctgggcaacatagcaagaccttgtctctagtaaaaattcagtttaaaaaagtgggcatggtggtgcaggctggtattcccaggaggctagggtgagaggattgcttaagctggggagattgaggctgcagtgagctatgattgtgccactgcacttctgcctaggtgacagcaagaccttgtctcaaaaaaaaaacaatgtagtgagtcatagttatactaaatgggcttgaatactataactagttttagtgttatagtcattaaaaaacaccataattccaaatggatataccaattactgcttgcttatcttatgcatccttttcctctcctctctatcccccaaaaccactcttgaaatcttcctgtccttttgctcttatcctacctggccatctatccaccatttatctagtataatttccataataaaaccaccagcttgcattagtgtgttggttacttcaaaggtggctaaattagagactttggttaaggacaccaaattcttaccaatttgatggtcttgaggggcaggctgtctggctcatctcttttctatctgctgcccaccttttactgcctgccccactaagcacttctcatcatgtccgaggagagagtaagtgggtgcgtgcatgcgtgctgcaagtatctgcatggcattctttttcctgaaagatcttctttttttttttttttttggccatcatttccattctgtcctaatatatcctttctctttaaaaaccagcatctagccaaggcattgatgaaaagttttctttgagctcccttgtggctgtgcagaagagtttattcctgaggttgctctcatttagggttggaatctttgaagataaaatacttcttcctacctctcacttgagatcaaggaaacctacataagactcccagagcaaaaggaccctgtaacacttgtgccttggcattgccatatgctctgttgcgcaggaatggggaggaacggccatccacatgccacccccacttccactcggaaataatagggggtgacaaatggctgctgcattctattctgttttaccaggctgtttctttcctgccctcaagaggtttctgactttctgacagcagggagctgaggttgatctagcaactgggaggattgcacctggatttgcagaaatacacatgcacatgtgtgcacgcacacacacacgcgcgcgcgcgcacatacacacacacacacacacacacacacacacacacagtgctgctgcaactcccagagtatcacataatcactcttctggctttagtggttttcctttggccacactctgctcttgtttggcttgctagcacagtaatcagaggaaagacagagactctttgcactctaatccccttgtgggttacagtagtttcagatagaagacactccagagggtgctatacaatttggaggtttataaaggccatcttctggcccccatttccctttaagaaatgagcccctcaatctgcattatacatgttcccttactgctagaagggttttactggtgccctgacactcttctcttcctcacccctcccagagcaagaactacaaaaacatagtttttttctcattttcttttagatgtatctgctgccatttattttctctctggtgattgtgtgatataggaaggggaagcatcaatggcttctttatatcctaaccacattccttgactgggccctgtttcacatctctgactcctctagagattactcagccaacatgctgcccctcctcagcgcatcaccttcttgggtctcagggcttggcattttcattcagccttgcagttccatgctcatcaccaacactgcagacatctgctgccactttcctgcctaaagcaagggaattcctgtgattcacaccgtgagcagaagcaggggtcctcttctactcagcattatcccagtttgtctcactcctttagccaatatcatgaaactctgaaactttatagcaggatgaaaacttaagcctgtagtctaaagacccagaattatgagtgaggaaactgaggccaggagagccatgaatgatagtgtttacttgattgctgtttcagatttcaccagcttttattgatacttcagcattttacttagtcgatatatctcttcgtgtgactcaaagtatcccagtggagcacagttaactgccctggatccgaattgccactggaggccgtggcagtgtcggcatcaatagggatcacccatgaccttttatttgggatgtagtagggggtctgaagttgggaaagtctgaggtggtactcagttctgggttgaatgtcttgtgaaaatcctgtgaatacatcttgcggagaaacacagaggggaaaacttcctgttgtgagagcagggctggttcccttttaaaaaggtataggatgaatattccatatttgaaatacttgagaccagaagtgttttggatttttaacttttttttttttttttttttttggaaatgctctggtgaacatttccttagagtgtcatgtgacactcaaatagtttcagattttggagcatttcggatttgggatgctcaacctataatacccaaaggctctatttcagtagaatttattggtttgctgattatagcagtgacatagttgcattctagagaccttagaaaatgcagaaaatttcaagaaaaacatttaaattgtgctcatagtgaaactgagaggtgaccactcttaatattttgtggcataagcattccagtcttttatctttctcaaagtttcacataaactttctcaaaggccattaaatacttttccatagcctgattttttgtgaccacatagtatcctattatattgataataccataatttacctaacccatttttatatatttggattttttccaattcatcattattatgaataatggtgtatctcagtggttattactttgcactgcatttcttatgaaagtattgagtaaaaggaagtaaagccctctcagagtgttttgtaggctgtcacatttcactccataatgtcctagtgtttgttgccaccagtgatatatgaaggtacccactgaaatgtcacacctttttggttttcctttttaaaataaaaaataaaaaagacatttaaccatataatattgttcttatatatgatttattataatgtagattcacatctttgagttcataaaaatattgaatttggattctctccaatttcccttttagtagaaaggctaaagttcggtaagaaattctacttggaattttattgaattgagaaacatacttggatttctgtaactcatgacaagtaacaaataaacaattagccaattaattaaaatatctgttaaaaccttgagtaatgcagagatttagttaggcagtgtagtttaaaaaaatcaaacaaaccagacctatgctgatctccttggagatgaccatcaacaggaaagatagactttaaacagtgtatgttgacatagagcaagtttctaattttccatcatttcaaggtgctggaaattatatggacataaatgcctttataatatgtgtacatctggtgagtataaattctcagatttgaggacatttccaataaaagactcacatacaaagtataaaaccagtaagcaatggaatgctaatcaagtaatgaaggattcaggaaagaaaataaaattatgccaaaccatgtaggccaagaaatgcaagtgggaaaaaaaaaaacttaagctgatgtcaaagtcaaaataaaatgtagagacaaatctctaaatttaatgttttatttgggaatcatagaatcacatttggggcatgcaaacagactgggtggtcttcagcatgtccaaagaacaaaggaaagattgggggttttattagaaagggaaatgttacttacagttttgaaagaaagctcattgaccctagagaagcttgtgggagctgcccgggtctgattggtgagtgatggtagtagataaaactagtcttaaagtcatagcaggttgtttcagcagctgctaagtaaaactggtcttatggttacagcaggctgtttcaacagctgggcttggagaaaactcaattcttggagcatgtgctgtgtcttgagtactttttcccgctgctctgtcaactcttctttagttgggcatgacaagaatgatgcaatttgcataatcaactttcacactgagtttcctgtagcctatacaaaacataaatattagtgtttttttacctttttacagtttttattgtattgtctattgaagtgaaacattaaagttatcagaatagagaaacatttgcctatcactacacattgagaagatactgtaaagagacttgaacaaacactgggcagtatgatgcgtagaactttcagtctagtttttacaagaaaaagaaaagaactgtgctaaccattttgttcatcaatataaactcaagtaatgaggttaaattgtagttctttgcagagtgcctggccaccaggtccgtaatcgctggaggtttgattagatattgagaaagaaatctgcaaaccttggcaaaatttgctgcataattccaagactgctggttcttaaatttatctccatcaaaacacagatgtcctgtgagctggactaagccatctcactatctataatcaaattattgctttcttttttttcccactgaaagatcgaaaaagaaaaaatgggtaaaaattcttagataactgtttttgtaatgtgtatttttgttgaaccttgcctcattgtataatcaagtaacaaatatgaatagaaaatactattgactatggatggtacttagctcaacagcttattttgaagaggaaaccatcatgtttttaaatatgaaacataatcatgtactttacgaataaaattcttcctatttcttacaacaaaattgaacatttcaggatttaatggtgttccatagccactagcacgcagtagctcataatttcaaggtgtttgaccacatcggtcagtttgaaaatcatacctgaccatcactattgaacacctgaagtgcaagcatccatgatggagactggagctgtccattggctactgcctttcagactaggggtggcaaacctgaccctttgttataaaaatgaaagccctcaaacgtgttcttgtcctcacgaagatttttgtctctactgaaatgcctgtaggccatttttggaaattatagctagtgtgctcactaaagtttttcttatgtgccagacacatgctctagctttacatacaatagctgtaaacctcacacaaccttgtaaggtagagagcattattatctgtattttattggtagggaaactgagaggctaagtgccttggccaagatcaccaagttatgaaatcacacgaaaggagagcctagatccctctaccagcactccttcctctatatgcactgccttgcagtaatcaagacttcactaaaagcaatttcagatctctgcaaatgtttgaacaagagctctgttgaaatgccataaaatataggatataaccttagctttgaaacattttgaggggagttaccaacttaaaaaaaaaaatgtttacctttgagcataaccacatccgaaagagtcacagagctagtcacagaatgtacccctcgataagtaaacaacataacctgttgaataagtaagtagtttagtcttctctgcctgcatgttgctaaaaataacttttgctttggtatagaagttttgaaagttgtgtagttcaatgaatatttgttgacagtgattgaaacttacattgtttctctcatgctaatcttgccaagctttggtggtcttcaagtatttgaaacaagaaagggccaggccagagccctcgttttcagatatgggacaacaaccaggctttctccatttgaaggaagaggaaagagataagggaattgttgcagtgaatcctgtgggccccaggagttataacaattgttttctaggacatacccatttcactcttcttaattttctgccatcagcatttctggggatgtactaggaaaatggaaggaacatacccagcttccagggtttcagtagtaaagtatagactagtttaagagcaaattgattagatcacttctactcctatgatgtccatttctcatataaagataagctgagaaaggtttattttaaaattaaagctagttgtttaaaagtgcggctgaagttaactcatggattgccctaaagtattgagctgtgattataaaaaaatgtttaccaaatattgtcactatggctcttatgtagtgaagagaagaatttagccttaaattagttaaaatgtgcaaaccgtttagaacagtgcttaacatatagtaagtgctccataggtattacctatgctttagaacagtagttctcaactggtgtaccacacggcacaagtatatctttatcctttctcagacatgtgccgaaacatctatacacatattaatttttttttgtatagccaaatatgtaggtgaagtgcacactgatgtttcacttggctgaataaaataagaggtgagagacacagtgtaatgtcaagtctttgcttaccagagtgaaatggggcatcgcctttcgggtctataggggtgcactgagcagtcccgttaaaaaggcacatgttcaaaaagactaaccaggtgagcagcatgttaattaccactgcttttaagaacactggaaaggcaagtggttgtatggtagtagcaattacattgtaattactgtgacttagttagaagtttttgaaccccttttgtatttcaaattgccctgtacatacaaagtgggtcagaaccatcagttaagaattagtggggtcagttcctgtctgtagctattaaagtgatttatttattgtcttataacattatactatattaatttacacatagccttggaaaaactctttctcagacttctaggccagagtctaaatacatttatgaaacttctcaggaccaggttttgatagtgcggagatcagggagagcctaaaatcataagacttctctaatagagttaggtcattaaagaatatgaatatatgaagagtagggcattagagacaacattctatacctaacattttggtccaaatcctataaaggtttctcacatagaaagctgcctttttgcatgtactacagcttgtgtctctaatatcctttctgtaccaatacacaccacatatctgattattgttcaaatactcctcttaacttaccaatgaaagcttcagatcacttaaagagattgcagatactatagtgaacatagtagaaaatcattattctattgtatagtaaaacccatgagttacatctaaaatgttactactgtttttatgtagtctttaaaaaaagagattatgaaggtttacaattatagtaaaacttattaagtagatgcatcaataggaaaagaaaccattatcctttcaacccagtcctatttcataaatagcacatcagcgcttcagtgattaagaaacatggctcatctttgcagcatgttgcttttattactttttgcccacggacctaagaggggagaggtaaagtgatagaggaaaaagctccaaggcaaatcaagttcacatatttttatttaaggattctaggaactcgaagactgaatcaaacttgttacttagtttttcactggaataatggctctatttctatagtagagtgagtagaaggttaatggtatctgccattgatggtttactaactggttaaataactgattgaaatgtggtaaagggagatgaaaacaaactaaatctttttttttttttttggcccagattttcacgtttagatgccatgaagcttttgattgtgggtctaaagacaaactgtgacagtgattggaggcttcttttaggggtcgggagatatatggaaggacaaggaggacagaggaattcaatctcctatgcagtctctgcacctgttcactaagaaataagtcagctgaggccggacgcggtggctcacgcctgtaatcccagcactttgggaggccaaggtgggcggatcatgaggtcaggaaatcgcgaccatcctggctaacatggtgaaaccccgtctctactaaaaaaatacaaaaaaattagctgggcgtggtggtgggcgcctgtagtcccagctacttgggaggctgaggcaggagaatggcgtgaacccaggaggcggagcttgcagtgagcagaggtcgagccactgcactccagcctgggcgactgagcgagactctgtcttaaaaaaaaaaaaaagaaagaagtcagctcagtccaggcagtagactttggggtgggccttgatggaccataagacctttgctgccctgtgacttctcccttagttctcagtctgttcagaaaacaatttgcaacaacatcagagagaaatagaatgcaaaacacagctcccttttgatgaattggctcctggctcggcctgcaaaagataacatggtttttcccttagaatacttgtcatgccaaaatgatggtatcgtcctactggggtttttaaatgttaatacaagtaaaataagatggatttttttaaaaaatggcaagcgtttcttagtttggctctcttggcttttgtttaaaactgaagatcactaagcctagatttttgtgtctccagtttaaaaaaaagtaaatttcaaaagcagttcctagaactctccctctccataggcctgttgtgagatgcctatgtccctataagtgtgcttcaatctaccagctttcctaaaacaggttgatggcttagtggataaagatgggacttacaaagcctattgattctcttattgtactcatctgtagaatgggaatagcaatggtacatgctgatcttacatgatgtgaggatgtgatgaaataatacatggaaggtattgagactactgtctgggtcatagcaagcagttttgccattattatatttgtcatgacagttttgccattattattaacccaataataatgtcgtgtcccctttctccattcttgtctcccaaagatgtcacacattcattattgccaaaaaacatttttaaagctttctgtttttctggtacttgcagtgtggctgacgccagtagggtataactcctctgagaatgggtgctgaattctgttcccaaggcctatggggaaatctctttttgttgttgttttttgttttgttttgttttgttttgttttttgttacagtctcgttctgtcacccggggtggagtgcagtgatgcaatcttggctcactgcaacctctgcctcccgcattcaagcgattcttgtgcctcagcctccctaatagctgggattacaggtgcccgccaccacacttagcgaatttttttttttgagacggagtctcgctctgttgcccaggctggagtgcagtggcgccatctctgctcactgcaagctccgcctcccgggttcacactgttctcgtgcctcagcttcccaagtagctgggactacagcacccaccaccacgcctggctaatttttgtatttttagtagagacggggtttcaccgtgttagccaggatggtcttgatctcttgacctcgtgatccgcccgccttggcctcccaaagtgctgagattataggcatgagccaccgcgcccggccacacttggccgatttttgtatttttaatagagatgaagtttcaccacattggctaggctggtcttgaactcctgacttcaggtgatccacctgcctcagcctcccacagtgctgggattacaagcgtgagccaccacaccccgctgggaaatatcttaaaagaatcaaaataagaaagttactctacttaaatcgtgtgctttttctgtgtgtgatttatggtaatcttaccatggggtatctgattactttagaaagatccatttagcttatttttttcttctttgggttatttttttcttccttccatttgcacagcctccccccaaataaaaaataaagatataaagtctatcttctccctcttgtcagtttaagtaaaaagaacttttgcttccattttaataatagaatttgtgtgtatataatataggcagtgatttggcctcaagctgagtttagatttgaaaagatgagaatattaaagcttgtcagccagcccacaaaccacttaagtatttctgatctgacaggatgtggggtggagttctttttcttttctccaccaacacccctcacaattaaaataaatcagataaaatagacactgtgaaggtgggactgaaagtaggtgataggaaagggtggccccacaccaggaccagtacatatgcagaaattccgtccaaagtacttcaagggtctaggacagtgctgtccagtacaactttctgtcacattgaaaatgttctgcatggcccaacagagtagccacaagtcacacggggctgaaggcagatagtgtaactaggatttgaatttttaattttatgtcattttaatttaaatagccacaggtagctaatgtcttgaacagtgtaggactagaaaaaatagattttgacacacattctcatgtatgaaaaactgccaaagagcatcagattgctctagttgtggaagattgatttgggagtaaaagaacgtctaaactgctatcctgtggaagagaaatagatttctattttgttgttccatagggaagaaacaggactacttgggagaaactgcagagcaacacatttaggctcaggctaaaaaaacttcctcagaattagtcatacaaaattctactcagatctcttcgagtttaaggacgacccccaattctgagagtactcagggttagacttgatggcagtttgacgaggacctgcagttccccatttataacacttgtcccacacagagtcactagttgtgctaagtattagctgaaacattgttttcataagtgctctgaagctaccaagaccattggtatcattttattagacatgactattatttagctaaagacaatgtactttgagtcactgtaaggccatttgttctaaaagaaacaaaaagattctccttgggatcccaagcggaaccctgttgttctaacagtaaacatgctccccatgactacgataggtggcactggtcattcagttgttaatcttaaacttttcagtgattatttcacctggaggggatgctgacattggcacaatagcctttccaaatacccagaaaatttctgataataagcaaatggatgaactcacagtagttcagctgtggtagatgctctcgttgctggttagtacttgtagcatccatcagccacggacccgccggttcctactgttggatgtaacagattcatggaaaagaagccttgtaggtaatgtcacagcagtggtcttaaattgcaaagaatttctaccagcctcacgaaccagggcatggcatggaattcattggccctgcttatccccccgtggagacgtgggaatggcaggactgtgaatgtggagctcagttacccagcagaggggtaacgctctcataaagaactcccacagaattaattagccgcattttagcactggagactgcacctcttacatagtaggagcgatggttcagaaagataatgaaggcccttaggttattattgatagaccctgccttctttttaagcaggaggacatttcctcgttctttctcttgttaaaatgataagtgcagagcactctcattaggatgtagccccttggctcccaaggacacagtgagatttcctttccttccgtgcatgttgtctctctctctttccctgccatctcattctgacatttcaagtaaacaggcatacatttacctgttggtaggtgattacatactaataaaaactacaagtaaggaacactaggcagcccccattttacaaattggcatttagtccctctataatctcttctctggagaggagtaatatccacctggatgtaaggctgggtggaattataatgcagccctgttacacagatggctgtcttcgtctgtgacatgtgtgcacacgtagacattcttgcatgtgcttttctgtcagcccagattgatgtgtgcataggttaaattgctagagaaatcagctttctacaccagttgcatctgatacaaatttctacctctggctgggccctggtgccaagtgtttgctcattttgacagtcctcaaatttgttgctttagatttttttcctctcatcttaaaccctctagtccagactttcgtatcacactttattatgtgtagatagctctaccaagaatatcaagggtatctagtaaaatcaccctcaacttccatctccgccatttaacatgaaaacattgttattcatgtttatgtcactccctctggagaaaaacatgttcttcattcccaaggtcaaagccatgttcttcaaccaacgcttacagtctcctccatggttttgtcacatcagtcattcctttccctttgccttgtacctgctgtctttttcaccacttccctctcagctcatgaactctagcgagtttcctccaatctttaaaaatctaaaggagaaaccacctccatcttgtgtgtctccatccctcaaggtcaaagaacttttatgcttgctgtcacccttcataacccgtggatgaatagttactgtatcctattgtgctaataaaatagtttcttaatacccaccaatgactttctaataaaatagcttcttaatgcccaccagtgaccgcattctgcctagttgacaagctgttccactttggatctctctcatcccatggactgcctgactttgccactccttgttcccatccttttctgtatctttgtcaggctctcttctctttctccttaaatattcgtcagtatcccaaagtttatagagaatgttacttaacagcatggatatgaggaacaggtaggcctgaattcaaatccttgctccactacttatatggctatggaaacttgagtaaattagtttttctgagtatgttttctcatactgacttcagatggttgtgaggatgaaattagcaaatacatgccatgtgcttagcagagtgccttaggtcactgcccctggcctgtctttcccctcttcccactgttcatgctcttacctgccattgttattctttctgttcctggcctccttcgggaacccaaaagccacattgtcaaccacctgccagacacctttctcaaatagaaataactatccctttttcccaaagtaaatttctccttccccaacttggcttgatagtctctctcaagtaggaagcacagatgtccatttgacctcctccctctctcttaccctcatatccggtcgacaatccatgtctatcctagcccctggattcttgagtctagacctttctttgattcttaataccaccatcttggctaaggcttctcctacctccagcttagattattgttctggcatcccaagtcgttccccatctctattctattgtaagcattctccctgaaattgtacatatattatttagttgccttctcaagttgttctcctttgtactttccaatcccttattaacttttggctgaaggtttcatagccaatctgtagctcaggggtagaaaggcaaaaatggttgatgccctgcatagagttagaactcattaaatgctgaattaatgcagtataaaataaagcaaaataggaagtgtagtaagtcataatgtaataagaagtggggataagtggttgattaaccaaaagttagctttccattgataaatactacagaattagttgtagaaaaaagagatttataacttgatcttcatttctcacctgagcctatgacaagagggtaatggattggacaaacaagtggaaaatctcagctggcatcaatgggctgtcttctgctcccacccagtgggtgtgaagtcactctctggctctctgtatacctctccttccagccattgctgatggagccaggtctctattttttttttttttttttttttttgagacagagtcactctgttgcccaggctggagtgcaatggcatgatctcagctcactgcaacacccaccttccagattcaagcgactctcctgcctcagccacccgagcagctgggattacccgccaccacatctggttaaattttttgtatttttagtagagctgagttttgctgtgttggccaggctggtctcgaactcctggcctcaagtgatccacccaccttggcctcccaaagtgcttggattacaggtgtgagccaccacacccagcctggatctccattcttgatataggtgttttgatcctaaggagacaatcgttggtgaatttgaaacagattcttcaggaaatatagtgcaagaccaaaattgggtcccaggaaaaatcatgtgatacttcgtaatgcaggtctcttgtagacacaagaaggcacacttgctcgtttccctgggtttggtttttgttttgttttcttccccctatgtctcacatcctctcctgcaaccccaaccctccgtaccgcaggcaagaaaacattgatgtttctgcatctggcagcatgtctctgggagaagaggccggcggaagggagtttgatgtgtgagtgacagatccccaggtaacaccactggggaacacttgatctgacctgtttgaaggtgaaaactcaccaggtcacactggaaacagttgctgctgggcatggctttgatccttgtttatctttttctcttttttttaaccttcttgaaaaaaatgttttgtacaaatggatactttttcctgtgtatattttgtctgctggagcatttgtatattttgtgtgtgtgttccttgtcactgcagggcggggttttgtaaccttttgatgcagattgtgaatcttaatgaatttgtcatttgccatggaaagatgtttgttcaaatagagcagagacattttcgtccaacaatattacaggaatattgtgtagaaaataatgactaatactttgagcattccatgttggctcccattttaaacacttcatgtattaacttgtttaatcttcagaagaattcatttttcctggttttcctgttgacatttgatgaaactaaagcagagggaagttaagtagtttgcctgaggtcacacatttagtaagtgagagacccaggactcaaactcaggcaggggttctagtaccagcagtgtttatcaactgctttccaaccctgacaagcatgagtgggcacaagcatggagcactagggcttacaaaaagctccctcaggctggcacattgcctgacttaaaggtaccgaaggcatggccctgccttcaaggtcattattgcatgctggttagaggagaaatctgtctgtctcatttgcggacgtgtctccgttgctaagtagtgtcaggcatgtaggagatgcttagtacaatctttttggattgtatcaatgtaggttttgaaaggttattagagcttgtgaatcatcaaggttgaaccataatcaattaacaagaaaggggaatctgagacttctaaaatgtaatggtcatgacttgctacctttagaaacaccagcgaaaaaaacctgtggtgtcggttggatcatggctcttattcactgcggcgtttttaaagctttttcaaggattatgtggggatcccaggctcctttatgatttataaatctattatgcatgtcacgtagagattttcatgacagaatcgtcagatgaactcattcagggtataatattgtaggagaagggttggcgaggttgagggggatgccataagaaaatgcctaattcataggtagagtgtaggacagaaatggatggggactggaggccagttaggacgacactgtagaggccagtgtgaggagcaaggacgtgggctagaggaggaggagatgagcatggggaggaaagtccagggagagttaacaggacctaccgactagacaagaggatccagggaaagagaatgaagcattgttaggaaagtttcacagtatagcggcccaccgataaccttaagaacctacaaacctaacagttttaaaacgatgagcttgaggctcagaaggaaaggcatgttaagctgtcatatcaggttgattgaatagattgggtaagtctttcagacatcctaccaccaccttctgccccatgctgttaattctttaagcattgggaccatgagttctgtctagcagtgtgggtgttgagaccacatgaatcaaggaagagggcttctagaggcccaagggctgtttgctgtagaggaggcagaggagggttccaagaatttcagaaggcactgtatagctctgccaggaagtgtttagagaactgaggtgcagcccccacttctcattacaacattttactaccatcaacctctcagcagaactgctgcattaggtacctagtgtttgatttgaactttgtatttattctccatgaaaaggcaccgtgcccattgatgtcactttggtgctgctgagacagaaagtgagtattttatgtgctgtctcttttcaagcaagatggaagggtcttgtaaaagtggtttctaaggaataacctaacattttaaagatttatagaacaagcatccacttaccagttcatttaagttttacaaaacatctctgcttctgccttgccatgtcagcaaaagattctgacatttaaataaataaaatatggtgggatataataaagtgcaaaaaaaatgatgcatcaagttactactgaaaggaatattgaggcctgagtcatctccctgctgctgtctcccaaacagaagatagctttaatcttcaggctctgtgttatttaaataagctgagggatttgcgagttgggggatgctgccaaatgtatccactgaagataatgatcccatttcagatctgcaggtctattttaatgaaaggagacaggtgagggtgcagaacagaaatgttcatagcacctgaccctccttctttccttaggagtttctcaacccagcgaaattggtgagatttttaaaaataaatactttggagtatatcatgaggtaggattactgtagtgagacagggagcagtaatggcagtcaggaaaacctgtgtatgttaaaaagtgtttgctaagtctctcctgtgtgtttagtgttgtgggggttttagtcgaaacaaattagggtctcagccaacctcaaagggtgtattttctcagtctttattgattcctcttggtttcctcagggctcagaacatccaacaccttaggagcaaatgtcctttgaatgaataggtttgggatgaggttctggaagacactaacacaaacaaccttgataaattacatggtagtgacttcatcacattcttccatctagtcggagtagctggcctttgaaaattacccttatgaagcttacattttactggagaagccagacaaaagaatacgtaaatgaatgaatgaatgagtgaatgaacaaaacaaaattatctctcgttcatagatcaaattgtcctaaacttgctcattaagacttacttagctatgcattttataccactgtccctgagcactttaatcatttattaattattcaacctctacattgctttaggtgaactggaggcatgagacaagtttgggatgcagactttttctttttattgtccttaagaactataatatatgcagttagttagaaaccctgtcctattggtacttttgtttcagtgaacttgagtttaaactttaaggcacagaggttattacagtatcatcttcaggaagctactggtactgaaaagagcattcttcatgccaccccagtatcatctttgtactcttacctttgtgttgagaagggatacatgtcacttataaaacctgggtatgactacgcaagccaccttcacatttgggatagaagattctacaaaagtaaaattcacaatctttgtacatacacagaagccagacttaccagcatgtattaaatctgtctttattttggatcatggcatttatggagatcactaagcaggcagctcatttgaagtgagattcagaacacttacttattttatccatttagcaaacatttacttaactcctactgtgtgtactacatcactggggaagacaattaggacccagtccttgttttcaaggagtaagtactctagtccaacatgaaacaactaatgaaactgagcagggataggcaaggcagaggtaagtgtgccttggaagaaaaggggaagaagaaatggtggatgttgaccaaggctggcactaggtaggctccaggttcccctgggatgctagttttagaggtggaagggcagttttgaagtctcatttcaggagcagggagaggctgtgcgttgatggttccagtaggatggggaaaggaggaggagtcagtgcagttggaccaggctcttgtctgtccatctcatctctccccagggataggatgacaaggaccccagaaatcaacagtgacaccagctgagtgaccacaggcagtaaacaccttacaatagctgctttgatttgtatccttgctggcgtatcttaacaacatgacgacatttaccaaatgaatgactgcttaccaagcaccagtctaagtgcttcacccatgttatcatgtttaatcttcccaattttgtgagataggtagtattattcccatttgaaaggttggaaatctgaggagtgaagaggtcacccagctagtaaaaggtagagatgatgcaacagacatacatgtccatgcttgtttgactgtaacacgtttactcttaacctctaagcaatggtgctttccttaatatagaatgtccttcgaaacatcccaatgccaaaattcagcatattttcatattagaatagctttgcgttaggtctctttttccctgaacatttcttttctctgttttgcagaatcttgttggcctcctttaaatatcattataaatgttggcagtgttgttttaaataattgtgaacagaaagtaaggaagcatatgcactctgatctttttaaagcgatttcattattgtaaaaaattctggttacaactcactaaattggtagtttggagcacctttgggtgtactcccagatactctctactcccctctcctccctcccacaaaaaaacagcatttctaaccacagtgactaagtcatgcacttctaagttagaaaatttatagatgggggaaaaatgtagttgaccagataaatatgcagatagttgggacatgtctaaagtgaaacactggtttcctgacacatattcattaaacatacagtcatgtcacaaaaagagattatggtcaggtgaatttattattatatgtccctcccgccccgagaatagtaccctatagtttatgaagcatgttgataatgaagttatctgtttcatatactctttatgaaaataatattttcccaagaagcctgaaaaacttacttggtcagtccaagtgagaaaaaattgaattattttgtatttagcattttaatccccaagttagaagggacatttaacaactgtactaaattcaaaaggttacttagagacagaattcctctttagatctaatatgattgtctggttttaacagtttggctttacaggaagacttggaagaccagcaaaactgccctttatttgtataaactctgcttgcatttgtgactttttttaaagggaaaaaataaaattctttataggcataatttttataaattaaaatacattatagtatatttatgtgggtgaagcttaggaaattctttataaaatgaactgtattttgaattggtcaactgctacattgtccaaaaatgggaatggtgattctgtggatgaagtggaagaacaaggctattctttactgtcaaaaagggcctttatgctatggtttaaaatctttctgcaaagcccttggatgttataccacacatcctgtagctcctacatgccaaactcccagctttttttatgtggagccccaggaaaaggtgatcacttacctgttagcctcatgcctggtggtgataagaaagatggctttggtgatactaactgaatgcctactagaagtcaaatgtgttgttgtttcaattttatggcctctctgctggtgagtatttaaaatgagaatcgagcaagtgaaagtgtgtcatagttttttgtttgtttgttttttaattaagaggaccaaaccaaagaaataggcccattttgttgagagaggcagtccaacacagtggctcaaagttccagagcttgcctgcaagctcaggcagatgctggtaccaggaatgccctgtacggataccaattcattcgtgggagatagtacaggggcaggtaatgctgaatcccagctccacttatgtccagagcacaagtgatggcacaaagccctagctctcttcatccttccactctcagcactttacatgtgttgccttcctctgatttgattccaagctcaggccccagatgggggcctcccagcaacatgtccctctccctttcctggcttaaaccaattagagtgggttctgaaactggagctggagtttatcccacagaaattgaaagtacagcagggatatttcccaaaggaaagttaggatactattttactaagaagattgagaggaggaggtgacaaaaacaacagatgtctgtacatatgtgagggtggagctgaaattgcttggtttctacagttagcattcgctcaaaacaggcagacctaagtttgcaggtgaggccagtccacaacccaactcagaggctgagacaagcaaagtaagtggaaaggagacggatggtagaaagaaataatatctattgggtgtctgttctgtgccaggatctttatgtttgtggcccagtgtacgccttgtcaccctcatgaagtggtattggaaggtttaaagggtttggagataagggtaaagatagatgtagagtcagggtcagccactgtagccaagagctttgggtagttccagggcaaactgaggaagcagacctcttagagggtaaaatgggttatgattttctaaagaggaaattcttctgtttgacctagatgtgaactgaataatcacttctgttgtttggaaagccataaagccagccaaccatgccacaatcctgatctcgcaactcacatatcttatttttcaacaaggaaaatcctttcaaagagataaatgtgaattctgtgtgccatgtatatatttgtaccacatttaatttcattagctataatatcatgtagctgtgcttatttaactgcttagcccagatggtaatgccttctgaagaaaaatggctacacagtgtaattgaacatgtcctattgacagagttacaacaacccattttccccattaaatataggtgattcaataaaatgaacacagagtctattactctgccaccatttctagctgaaaatgcaaggaggaaatgttctacaaggtgaagaaatggcacagttatgttgcatgcagtgggaggacaggcgtaaaggcaggcctcctcctcccgccttggacaaaagaggagctatttgttgacactcagatttggttgggaaccaaggggagaaccttggcgtcatcagctaagacctgtctgaaagtgatgatgatagcagatgtgaacatgaaaactaggccgtacattttggaaaatgatgtaaaaggatttggcttctaaatggaatcaagtggtagaaacagttgtgttggctctcagcagatgagggtcttgggtcttatgaatgttgtcaatcactagtataaaaatattctggccaaattagtatatgagaacaactatctgatgaagctatcactgcaaatatttttgtattcattgaaaaaaaattgccaaggcagaaggattgcttgagcccaggagttcaagaccagcctgggcaacatagcaagaccctatctctacaaaaaattttaaaattgactgggtggggtgatggtgtgcatctgtggtcccaaccactcgggaggctgaggtgggaggattgcttgagcctagcggttcaaggctacagtaaactgtgaccataccactgcactccagcctgggcaacagagcaagaccctgtctcaaaaaaaataataattacagggttggcctccctgatcctgtatatattgtctatgaaattgacaggtttggtgtggtctaagaaagtaagtcatactcgacactgaaactttcctaggaagagcactagagatgatgtgagaagatgttattgaggaaaagtttgggaatggcaccttgccatgtggcgggacttattgcagttgctatgtgtatattttttcttagttttcttcatgttttatgagtaaagacttacagtcgttctctgtctttgcttatggggaagttgagaattttagagtcaaaaagacccaaaagcccactctggcttaccctctcattttcctgaagaggaaagtgaggcccagtgaaaacccacacaactcaggagagatgagccagggtccaattgtcccttctctcattactgcattttgcccttattccagtgctaagggacttttggggatgaaaggagagaagtgggaggctggaaggagtgaggtttcttgtcctcacagctagtcacccagagaagcttaagaaatcattacaggcattgtggctcacacctgtaatcccagctctttgagagactgaggcgggagcatcgcttgagaacaggagtttgaggctgcagggagctgtgatggtaccacttcactccagccggagtgacagagcaagcccctgtctctcaaacaaatataaaaataaaactgaaaaaaagaaattacttaaaatatttttcttatgtaaagaagtacaaaatttgaaacccactctcctaaacaataggaattcgtacgaagagtgatgggcatatattatgcctccctcttcttcactcctgtccagtgtgtcctagatatgggcgtcacaatggctagtatatacctaaatgaaatgacaaaaagtgaagctgaaccttgtcttcttatggagaatatattcagaaggtagaataaaaagatattttagggtgattgagtttaaacaagtagaacctggtcactccaaccccacccccgatcagattctcaaaaattagacttagaaatcatagtcctggatgttagtcaccctttctgcaagggaattgctatctgaccttgcatattgcatgtggacaagttcagagccatcagatccacctgagaaaggaggcaggaaaagagggcaagccttatcaagctgctgtggggatgaatccagtccggtggaagaaactatcccacctctgagccctgccagcacaagccatctgtctgcatctaacaacaccatgggcctcagctctgaagcccctcccttggtgactcagcaatcaaactgttcattttgcacatgttttgtgtttgattcatttagtcactgagtcttcagtttctctgcctgctttttgccctgctgatggggaccagcctccaggtcagcacagcaggttgagcctagagaggcaatcacagtcccaggatgaacttttttttttgtccctgaaaggggcctttccaggagactccccaggggctgctgatatgctcttccaaggctttcctgattgtctgtccacccatacccaaggggaactgatgtttctatcctctcccataggccttttctaggctttttacccacttccagcctgtctcctaggggcctgattggccctctccacttctcccaaggcagcctttcttcacttgcctcagccacctaatctctgtcccaccagttttggggttttccttactccatgcgtttacctttccacacttgcacatgcacacagcaccgcatgaaaactcctaggaatctctccttcaacatggcttaatagtccttcttacctaatttcccagtgacctctgactcacagttacacaaaggaaatggacgtacacctggagcccagctgacttgggctaaggttggtcatggctctaggtttggtttaccttattggctagaagacagtagaggcccaggcactgtgtgctttatggatcgtctttctaatttacttgaacctgggatccatggtcacttctaagagatcaagtctattttactctaagtagtttctttgagtaaggttggacatttatttcccttgacataaggtaaacaagtgtgcctatgagtgtggcaacaatgaggagacattgaatcctcaagtcacattggcatgcttgttgaggcttttaaacgatctcagtatcacagttcttggtaataactgtaaaaacataatcacaggtggcacttggcatgaaaggtatgcttggttcttttttttttttttttttgtgacggaatttcgctctgtcgcccaggctggagagcagtggcatgatcttggctcactgcaacctccaccttctgggttcaagtgattctcctgcctcagcctcccaggtagctgggattacaggtgcctgccactgcgcctggctaatttttatatttttagtagagacagcattttgccatgtttgccaggctggtctcaaactcctgacctcaggtgatctgcccgccttggcatcccaaagtgctgggattacaggtgtaagccaccgcgcccggccgctcagttcttacataatgagggcatccatggatttttaaatggaggtctttatgtttccagttccgtgtcttcccaccttcagaaagcactattttgctgaatttgtctaaagggcagtagcttctagagtaaccccaggagcaggtcttctcaaaatgcctatttatcagcctttgcatgagttttgtgggagctggatagaatggaaaaagaaatgaggaatgttcttcagatatgacattgtacagatctattcttccaaagaaatttgccttgagaatagtactccagacatggaaggggctctaggtatttaggctatggcagaaggtaacttgtaacatcttttcagaatttttgcaacctctgattctttatttgacatttttctttcttaataagatgcacagctagtacagcagcatcctgtaatccatggatttggatgttctgggcgtaatcatccctcaaaatgcaatacaggtgtggttagtctaagccatcttcctgcaaaaactttctattcctcatcccctccttagactccctgtttttgtaatatgttgtcaactgaaccacatttatcataaaatttatcattttctttgtatttctactgagatctagatagtcatcaacatgggacatctttccagcttgaagcaaaaattcttggtacttaggtatctcctgtagccttggtagaggcatgtgtggttaggcctttctgaatattgaaaagagctcccttatcccccagttggatccatggaactcctggtcccaaccactgaattcagcactgccttgtttttgcctcaataccacaatgatggagagaagctctactttaggattcttatctgacaaattagacagcaggaccccttctaccttctaatatattagatttaataaaataggcatatactctctactccagagaaccaaatgcctttcagcttgggaaactaaaatacaggggtgtttgatttgtgtgtggttttgcttgtttgttttgagactgagtctaggtttgtctcccaggctggagtatggtggaatgatcatagctcactgtagccttgaactcccaggctcaagcagtcttcccacctcagcctccctagcagctgggactacagatatgcaacaccacacctggtttattattttttttttaatagagacaaggtcttgctttgttgcctaggctggtcttgaacccctgacctcaaatgatcttcccacctttgtctcccaaaatgctgagagtgcaggtgtaagccgccatgcccagcagagtgagttgttttttaagatcacactgcaagtttatgtaagaatcacttgaataactttttgttcctgttgggttaagctggtgggctagatgcttggaagttgtagaccttactctcaagaagtttctgtgcaagagagcaaataagcaataagtaaaattaaccacattcagcagtaaagaatgattttaagccaacagtttatgatgcaagatttaagagaatggaaaagaagttatttcttttaaaaaaatcgtttgagatgaaattcacgtaatataaaattaacaattttaaagtgaacagttcagtaggatttagtatatccacagtgttttacaaccactgcttctatcttgttcccaaatattttcatcactccagagtaaaaccccttacccattaagtagtctgtacctatcccttcctccccattgcccttagtccccagtaaacctctgatctgtgttctgcctcttcagatttatctattttggaatcatacactctgtgaccttttttgtctggcttctttcacttagcataatgttttggaggttcagccatgtatgtgtgtataattactccactcctttttatagctgaataatactccagtatttgtatataacatgatttgtttatctgtacatgcactgatggatgtttgggctgtttataccttttggctattgtgaacagtactgccatgaacatgtgtcacatatacttgtttatgtacctcgttttggttcttctgcatatatacctaggagtggcattgcaggacgatatgatacttctacattaaactttttgaagattgccgaactattttctagaatggctgaaccatttcaagttcctaccagcaatatatgagggttccagtgactccacatcacttccaacacttgatattttcctttttcttaaaatagccactcttatgggtatgaagtggtacctcattgtaaatttgatatgcattttcttgaccaatgatgttgagcatcttttcatgttttttggccatttttatatttttttttagagaaatgtctactcaggttttttgctcatttttcaatttggttatttgtctttttgtcattgaattgtaagcattctttatgtattctggatactagatacatatgatttgcaaatattttcactctctaggttgtcttttcactttcttgataataaatgccttttgatgcacaaggtttttaatttgatgaagtcttagcctgtttattctgttgtaacaaactacttgacactagagaatttataaacaaaggaaatttatttcttacagttatggaggctgggaaatccaagaccaagatgccagtagatttgctgttgggtgtggggtgctcgctctgtttcaagattacaccttgttgctgtgtccaagtggtggaaaagcaaaaatgccaaactctgtgtgaagcctcttgtataaaggccttagtcccattcaagaggaaggagccctcatgacccagcctcctcctgaaggcctcacctttaaaactattgcattggagattaaatttcaacatgaattttgagaaacatattgagaacatagcaaagtccagtttatctgttttttcttttgttgttaatgcatttgatatcacatctaggaatttatggccaaatccaagatcatgaagatttaccactttactttcttctaagagttttatggctttagtttttatatttaggctgttgatccacgttgaattaatttttgtacatggtatgaggtaggggtccaatttcattgttttgtatgtggatatccagttgtctcagcatcatctgttgaaaagattattcttttcctgttaaatagcttaggcatcttgttgaaaataagttggccataggcatatgggtttatttctcaactctcaattctatttcattggtctgcgtgtctatccttatgccagtagtacactggtttgattactataggtttgtaattaagttttgaaatcaggaagtataagtcttccaacttttttctccttttacaagactattttggcgattgagggtccattgcaattccatacaaatctgtggatcagcttttgcatttctgcaaaaagatcactagaattttgatagagattgcattggatctgtacattaccttgggtagtactgacatcttaacaatactgtctcccaacccatgaacacagggtgtccgtctatttattcaagtcttttaaaatttcttttagtaatgtttattttataattttcagcatataagtctttcacctttttggtgaaattgtttcctagatatttcattctttttggatactagtgtaattgtattattttcttaatttcctttttagattgttcattgctgatgtgtagaaaaacagctggttgagaatttttgcatcaatgttcatcgcagatattggcctgaaattttctttttttgttgtgtctctgccaggttttggtatcaggatgatgctggccttataaaatgagttagggaggagtccctttttttctattgtttgtaatagtttcagaagagatggtaccagctcctctttgtacctctggtagaattcagctgtgaatccgtctggtcctgggctttttttggttgttaggctattaattgctgcttcaatttcagaatttgttattggtctattcaggaatttgacttcttcctggtttagtcttaggagggtgtatgtgtccagaatttatccatttcttctagattttctagtttatttgcatagaggtatttatagcattctctgatggtagtttttattactgtgggttcagtggtgatatcccctttatcattttttattgtgtccatttaattcttctctcttttcttatttattagtctggctagtggtctatctatttttgttaatcttttcaaaaaaactagctcctggactcattgattttttttttttttgaagggtttttcatgtctctatctccttcagttctgttctgatctatactggcaaaccaaatccagcagcacataaaaagcttatccaccataatcaagtcggcttcatccctgggatgcaaggctggttcaacatatgcaaatcaataaacataatcgatcatataaacagaacaaatgacaaaaaccacatgattatctcaatagatgcagaaaaggccttcgataaaattcgacaccccttcatgctgaaaactctcaataaactaggtattgatttaacgtatattgaaataataaaagctatttatgacagacccacagacatactgaatgggcaaaagctgaaagcattccctttgaaaactggcacaagataaggatgccctctctcaccactcctattccacacagtattggaagttctggctaggcagtcaggcaagagaaagaaataaaggcattcaaataggaagagaggaagtcaaattgtctctttttgcagatgacatgattgtatatttagaaaaccccattgtctcagcccaaaatctccttaagcagataagcaacttcagcaaaatcccaggatacaaaatcaatgtgcaaaaaccacaagcattcctatacaccaataatagacaaacagagagccaaatcatgagtgaactcccattcacaattgctacaaagagaataaaatacctaggaatacagcttacaagggatgtgaaggacctcttcaaggagaactacaaaccactgttcatagaaataagagaggacacaaacagatggaaaaatagtccatgctcatggataggaagaatcaatatcatgaaaatggccatactgcccaaagtaatttatagattcaatgttatccctatcaagctaccattgactttcttcacagaattagaaaaaactactttaaatttcatatggaaccaaaaaagagcctgtatagccaagacaatcataaggaaaaagaacaaagctggaggcgtcatgctacctgacttcaaactatactacaaggctacagtaaccacaacagcatggtactggtaccaaaacgtagatatagaccaatggaacagaacggtggcctcagaaataacaccacacaactacaaccatctgatctttgacaaacctgacaaaaacaagcaatgagagaaaagattccctacttaataaatggtgttgggaagacctgctagccatatgcagaaaactgaaactggaccccttccttatactttatacaaaaattaactcaggatggattaaagacttaaacataagacctagaaccataaaaagtctagaagaaaacctaagcaataccattcaggacatagacatgggcaaagacttcatgactaaaacaccaaaagcaatggcaacaaaagccaaaattgacaaatgggatctaattaactaaagagcttccgcacagcaaaagaaactatcattagagtgaacaggcaacctacagaatgggagaaaatttttgcaatctatccatctgacaaagagctactatccagaatctacaaagaacttaaacaaatttacaagaaagaaacaaccccgtcaaaaagtgggcgaaggatctgaacagacacttctcaaaagaagacatttatgcggccaagaaacatgaaaaaaactcatcatcactggtcattagagaaatgcaaatcaaaactgcaatgagatacgatttcatgccatttagaatggcaatcattaaaaagtcaggaaacaacagatgctggagaggatgtggagaaataggaatgcttttacactgttggtgggagtgtaacttagttcaaccattgtggaagacagtgtggtgattcctcaaggatctagaaccagaaatagcatttgacccagcaatcttattaccggatatatacctaaaggattataaatccttctactataaagacacatgcacacatatgtttattgcagcactgttcacaatagcaaagacttggaaccaacccaaatgcccatcaatgctagactggataaagaaaatgtggcatatatataccacagaatactatgcagccataaaaagggatgagttcatgtcctctacggagacatggatgaagctggaaaccatcattctcagcaaactaacacaagaacagaaaaccaaacaccgcatgttctcactcctaagtgggagatgaacaatgagaacacatggacacagggaggggaacatcacacaccagggcctgttggggggtggagggctaggggagggatagcattagcagaaataccttatgtagatgatgggttgatgggtgcagcaaactaccatggcatgtgtatacttatgtaacaaacctgcaggttctgcaaatgtatcccagaatttaaagtgtaataataataaaaaaagaaatacagctgatttttgtgtgttgatcttgcaattttgctgaattaattttattagctttggattttctgtacatagaataatgtctgcaaatagagaggccatttctttctttttcttgtctaattgccctgggtagaacttccagtgcaatgttgaatagctatagataaaagcaggcatcttcatcttgttcatgatcttaggaagaaaagctttgtctttttccactgagtacaatgttagctgcaggtttttcataaatattctttatcatgttgaggcaattcccttctatttctagttttgtgagtatttccagcatgaatgggtgttgaattttgtcaaaggctttcttgcatcatttgagatggtcctgtggtaagtaaaatcttaaagagtaggactgataacagatacagagaaatgcgattctggagaagtaagtaactaacttacagtggtaggtgcatgactagtatctgcagagattagtgcacaatctaaatcactgtgtagagtattgggggcagaggactgaatgcagtacaggcaagggcagattctgagtagatcagggaggacttgattgacagattgccttcatcttgtctccattctggagatccttatggtttctgagcccagtcaaactaggaattgtacgccttgctcattgttctctccttctgtgtcttcacttctcttccttctattgactttcatgtccctctaacaatctttcctttttaattttggtagaaaagtgtcatgtaaaacaaagaaaaaatggagttttttggtactgtgtgataaatcttatgattttttagaatttaggagtacacataaaattgagaggtgagccaacttttttgttggtttatttctagttatgtatggagatagacctgctaaccagccaacagctagtgtcagggctgtaaattagactggaggaaagaatgaactgcacatttctagctcctgggccaaggttcctgagatttttgccagccctcttctagacagcagcttggtacctcagctgtccttctcatcagggagacagatggaacctctgaggtttcctgttgaggcgtctcagaattcaaagttgttatgatgtgtgggctttgaaaatgccacacgtcagggaagctgagtttttgtttctcaggctttcttatattgagcatgtgttcctttctgtctttgtggcattaagtttcattatgtgtgtccccaagccttttcctggaatctcaacagaggatgggttttagctctgttggaagttacattccattaagtgtgctcaaagatctgctttactacacactctctcctgcccaattcttaggccagccccttttcctctccctactcttgtctaattagtcctctccttcaaaaggcagccctttcatgggattctgctccccgaagtagtgggccctgacttaagggccagcccatctttgtccatggccatacttatcagggatgtgactatttagctctttaaccaggagtctgtcctttctagagaccttccagcatactattaacctaagtgcataggcagaggagaccaggagcacttggtacaaatgttaatggctttttcattagcgtacttcatcacagaattccagctgttggtggcaggaggtgacagtgaggcgtctcttggataagaaggacgtggagatctacggagatgaaaactgaaaagatgcatatgattagtcatcagaaagatgtttgacttctaagttttttccaacagcaggtatggctgcatggaaaatgcatacatccattgttgcaaggcctttatttccttatcaccatcatcaagcagtattaatgaagaagccaattgtgcatgacatagtgcaggtctctgtatgtagttatggaaaacgcttccacagttaaattgagtatggatatgtaaagtgattaaccaagacttgacagctcacacaattctttaattgcagcaagcatctcaagtaaatacataacttttaagaaaatccagaactataaagtcttaatttttgaaacaaatcatgatctttcacgttacaaacagatctttctttctaaaaagatgattcacaatcttttatgctggaacatcaaacatagattttactttacttctttttaaaataattggtttgttaacagttaggaaagccatacgtgttatttgttaaaaaaataaaaataaaatggaacaataaagaaaatgtatccaaactataaaaagcaaaagtcaccaacttgtcccagctgcaccccctccaccccacccatgtttctgttcccacaggacaaccattgctagcatttctctctgtagttcatctcttttgaaagtacatatgtaagtgtgtgttaaatgattatttcagaatttatattgataaatgcctatgttttctattatttcaatttgcccacatggagggtgattgttttttagtgtgttcccttagcttctggaatacaaaagctgatgcctgtataccttgactttgctgacggcagtggtagtgagtttagtgctttctacttttagctttatgttttgcactatttttgaattatatcaattagctatgatgtatacacattcaggattctttaattttgggtaaaaataattcttcactctgtgcctacttagctaagaatatctttaacagaggcagagctgtgaaaccaccgagcaccaacactgcctctctggcttttgcagggacgcttgggtttcaggctgtaactcttagttgcattagcctctgataacttttttgttaattgataagtatgtgtatgactcatcaagatgctggttgctcagtaagataaaattatattctctaacactacttctcctttagaagcttacttacctgccttggtgtcttctgtctcggtcttactttgttttttagtttgtagtttgttcttcagcttactaaacctctttcattgactgtggtattggctaccgatttaaaaatccttgaagacttaaaactcagcagacacgtacagggtggacccctgctttttctcaagtctcccttcatctccaggaactgaatttttcatgcagtaattaaaatttgtaggtcaagcctcccatggcaccgtttgctgctaatatgggaaagcagtgatcagattcgcttatgctgctcttcactgagctgagacttaaaggatgaagggtgacattttcccccattttgtaaattaatgccattgatctgcctaacaagaacaaagttaggcttcaaaataccaaatgataaagagattaagactttaaatggctttccaaaaggcaacctctattgtaaggctccgagctgactattgaactttcaattagaatttctaataggctattgacttaaatggacaaaatgttacaagtgatagctttcaagatgacaaagattgcttcttacgttctggaatattactttatgtagcgtgcactgttctggagggtgaataataataaactgccctccccctgtagagtgtcttctgcatctgtgctatagttttctcaaaggtgaataaatgcattttttaaaggcatttttgaaatacttgctttttcatgtgtttgctgaacacaggttttatgaaacctttcatggcagggaagtcccattagtctttagcactgtggcactattcttcttttatgaaaaatagcccatgtggtatgtatttctctgcacacatgtgtgttcatgcatgttaacatgtgtgttcacagttgggacaccagcagatctgttgtctatcattgccatgaggatcagtccctgaggccttgctctctgcctcagtttactgttgttggaagctatgattcttttccacaatgggcttgcagtgtagtgtgactcaatttaggccttgttgtgaaacactagctctaatacatttttaaatactaattttacaaagaccagctacctcttctaggataaagggttaatattatgcttatgttacagtgcattaaaaactctaattaaaacagcattacattcccatctgccaatctccagtaatcttctttaattgcagtaattaaactatatttacatgttcagaatacttgtaatttagcaaattgcactctctgctctacatttaatcaaacaaccagttccagtatatttagtgtggaaagaagtaatttcaatgttttgattactatagcagatttgacagagtaagtgcccctctagtagagggcttgaaagggaaggcaaacatgaaatatagtcatggttttgattgtcatgtgaatgcctaattacatgttggaggattaactattaaagggtatcatggttgcagttgatgtttagaaacagccggtattacagatagcatagactgtcttttaggaaaatttcacaagaagttttctctttaaaggttgtgagatcataggaaaatttagtgaaaagatcgcctacattgtataattgttattatgtcttctacctgtgatcccaaagcctgctatacaagatggttattttagtcttcccagttaaagcccagaagaaattcaatgataaacaaccaagagaaattgcaatgattatatcaattcagggatgagtattccctcatttcggtatcttttggcaagtctggttgactctggagaggacatgtggtttcctggaaaggactcatcagtagaagtcaggctttttttattttaccttttgctgctgttgttgttttaaaccatgactctctactaggctgttccacctaacccatctccagcctcatctcttatttatttatttatttatttatttatttatttatttatttattttgagacagagtctcactctgttgcccaggctggagtgcagtggcgtgatctcggctcactgcaagctccgcctcccgggttcacgccattctcctgcctcagcctcccaagtagctaggactacaggcgcccgccagcacgcccagctaattttttttgtatttttagtagagacaggtttcaccatgttggccaggatggtttcgatctcctgacctcgtgatccgcccgcctcagcctcccaaagtgctgggattacaggggtgagccaccgcgcccggcctggcctcatctctttttttcttggttttctcattttaaaaacaagtaacagtgttgtgaatattgattagattcaaaggaacaatgtcttagtcatctcaaagctatttttaaaattcttattgttattatctctttgcaccagtatgaaagtttctgtttctttatctagataaatttgactgggatattgggtattgccatcaaatctctgttatccaaaacaacgtgctaatttattcaacacagaaatataagtaatactctctttttcagtagcttctttttaattatttgatgttaacagtatttctgagaatttttctctctctccacttcggggtcatctattgtattaataaggattatgaattaatgaaaacaaaaagctagtctagcgtacctgtttaaaccaatgtgaaaccttgcttcttgaccatatgaaagagcaaagctactgaattgttaaaatgatatgcaggagtgaggatccaagattttcttcatgggtcagctagtaacttactgtgatactgagagcaacatgtttgactgatttaagtctcagattgttcaaggtggggtagagaatagggcctggatttttttggttcatgaagagtcttgacataaagtaagtattagactttagactgtcacaggaataaccattcagttcaaatctacactcatttctgtgttagattagtgagaatttaacttctgaaaaaagttcaggcaaaataccgctgatgtactgcactaaggagatttgagagtgccagagatactttgaaaggaaaagagatgtaatttgaagtggaggacagggctagccagggttaaaattgcagctcttttacttagctatttaataccaagcaaattaccttatcctctgaggtcttgtctgtaaaaatggggataataatacatacatagtactacactattagtttttctctcctatgacttgccatctgtgtccatgtatggagagaaacacacacacacacacacacacacacacacaccccgtaataagttaagagtctttggaatggtaaatgatttgaacataaataccagtacacattttttttaataatgcagcataaatgtcaagatatatatgcataagggatgaggtgtgcctagaagctgtaatatctagaattttcgcaaaccttatttataaccatttgtttctgaaccctaacaattcttttctgaaactgttaactgaaagatctgaatctcactatttatttcacactcttcacatagaggtgctaatgagcagcagaataaccccaaaaatggtccttaatccaaacaccgagaagtcaagttataagtaattaagaatacactggatggaacatacctacatggcagctagcatctgtgctttccagaggttgctggggacggttagttcagttctcatttttgatcctctttggaaactcaggagttaaggtcagcatcctcagtacaaaggtacttgaacatgtatgaatctttgccttcttgaaaactttttatcttgggaataaggaacctgatacaaagagaatctctagtatttcattccatcgagagaagttttgacatttacaattctgctaatttcacacatcatttcgcagcatgcaggattttggcgcctgccaaggggactgcaaattctttttggaaaaagtacttttttgggtgttggaagagttttgagttacagacacatttctttaatagtgttcttgaaatgtccatgtggtcttaatatgtaaatcatatgaaactcaaaacccactcctgaacttactcttccaagaaagctttaaaacagccctcattctaatagtaaggctgttttcctcttttccaatgtttatgtatactgtataatgtttactgtataatgagtttattgtataataagggactctgatttattagctcttcattattctcattctgtcagcttcccaataaatgctacaacccttggcagagacatgagtctcaatcaggtgatatcattgctttttaatgaactcttcttaccggagtaacagcattacatgtgaaataccttatcctgcattattaacggaccgcagcataaaaggcacaaaggcactgagaaggttgcactgaaaaatggggcagaattcattaccaattcgatatactgtcagctaacagtctttgattatcatatttacccttctgaaactgtgaaaaatcatgggcggagccgctgtgaacaatagcatgtgtaggcattttgtaaatgttgccttagttgtttaatgcccaggctgactgctggaatttaacacagtgacaactttctcagatggggcatgaaaaaaactgtgatattttactacctgagaagttaagcactgagatagttaggacccagctctcattagctgaatggtagatttttctaattagttctttctagtgcaattagcacgaaaagagtctaatcacctcatgtgaaaccaatctaatgctcagaaaagaattcccttggcctctctttcagattggatcttaggattttcagtctgcctccttaaagaatggaatctgttagtgactgattatttgaacggtaaggacagatctgtagaaaaggcaagaaatggacaacttattgacttgcagtgcaagtttggctggagaaggtgtttagaaatattcattaattggcagttatcacttcaactataggttctggttttcttgatttctttcattttgaaatgggagacttgggcccgggacagctatagttcagcatggctgcctctctggagggcatgaaacatactgcacattagaatcaaatgcattcggggcctgggactactgggcttgctttcttagcctctgcagtgcccagattcccccatcagtttttgctaatctgtgtgttcagggctttgcctgtcctctctctctccctgccttgcagtcatctgtaggcaccacattcatttttgaactgttctctaatttctagtgcccatccatcacttcacatttcttaagtaagccaactctgggcatctcagttgatattgttcatttttaactggaaaggaaactataatgacagcatttctggcacataattttttctttttttttttttgcgggggggaagtcgcttgccagaagatcgatgagaaaatgctgagtatgtgtgtatttattatcaactatgcagaaaatgggcatccttgctcatcaggctacagagggtgacaatattgaatttccattgttcatcccatcactgcccagtagaacttcccatgatgttggaagtgttctgtacctgcactgtccaatacaggaggcactagcgacatgtggctgttgagcacttgaaatgtggctagtgagactaaggagctaaattttaaaatttcatttaattttaatgagtttaaatttaaatagacccatgtggctaatggctaccatactgaacagggcagatgtagatctcttccacctcctaaccactgtaccccaccttacacatagctgcatccttaacagagaatacactgccctccgcagcctcttgctatccattctcttcagctttgccttaaaagcaatcagactttttccagtgctgtctggagtttgacacaaggcattcccttggcttgtgctatctgtagatcattctgtatttcaccgtggcagtgttttgttctaaagttggaaaagaccttgtagttttttaaagagccaaaatacaggattgtttctaagaaaggaggtggccagaatcagtaaatttaagctcatttgtggaagcttccaaatctcaaacctagggcagtattgaacacctctccaaaaagtcagattaagtatttgcaaatggcttcaacaaactccctctctatgaaattttaattatagttgattaaatattcactttaatcatcttaattaatgatatttgacaaatattttagctttgcttatgatattcacttgctctgtcagaactctccagttcacactgaaagggtaaagttaacaacctggacagacaggcccatcatgtgtgttatgacctatctggtttcctactcgcatggttagaaggctcattttattgctttgaactctggaattaatcctgcttaaaggagaatagtaagaatactgtggttttctgctcaacagaatgcatgttcatttattccacagacactaattgaaggcccattgtgtgctagtaattgtggtagtcactgagaacgcatggatggaaagacactatctatcccactggattgtaacctcaagccactggaacataaacagttaaaagtactatatgataaatcttctggaagacgggtgatggaatgtaagggaagaaacactaagtggtggtttcaaaacagaaagacttttaagatgtaacatgtaagggaaattttatggatataagggaatacaagggagagtcttaaggggattacaggattttgcccgggataaagagaaggtggggcatttgtgaaggggattatgttttcctaattaactgtattcttgaatgtctttgaagaaaggagtctctcctttcttcattttgtaaagcaacagtgtgtgttagaggaattgctgttaggaaaggaatgaggatatttggtgtgtaactgtgagtgctgggaaatgaaacaaaaggcagccctacctcaggtcctggaaaggcacatagtggtgtgagtgttgcagcccattgaagctacatcctcaattctggaaactaacaagaacagcattagggtgaggccagagatccacctaaggtgcaaaatgtaagggggcactcactttgagggtcgtgcaggttcaggatcagtactgacacaaccctgagaatgagtgtctcctaaaattgtgtgccctagacaccttacttacgccctgaaacatcccagccctgggtttttgtgcagtgaatgggcttgaaaagcaagtagataagaatctgaaccatggaaatatggcagacatggcagaatagaaatcaatgagacctatttgcaaggtaaagtcaagagaacctagggcagaaaaaaatacgaggcatgagagaggggaccctaattgtcctgtcactgaattctggggatcttttctattgcctgatactgacttttctccaatttctcatattcctcagctcctgccctgtcctgaaggtcatgcccagttcaaattcagcccttacctctttgctaagtcccatgccctcaaccttgttttcagagaaggccatgagaactggagtttttaaaatgtccaactctagatagatctgctttactgagtggtcttaacacattcagagaactgcattcttcttggctctctaaattcagtgaccttattttaaaagatgatcaacatgggttagaaccttttgaggattaggagacattttagcaagtttatcaagaataagcaaagatgacatttggctagcagtatgtctcccccaccccatcctgcaaaaccattttttttggagtgaagcttttccatttgacaagtttagaattaccaatactgcttgcaactccttccttactccaaactctgggatgttttcaggagggactcttttcttcaaaggcatccaagaatatagttaattaggaaaacatgcaagaaaagacatcttggctcctctggccgcctgttgtactcttccagcatatgctattacttgtctcagataagtagacaggtggctgtttgcaaagcagggtccaatgtgcctttgactcagagaagtttggaaacaaagccctctgtataataagcttctcactgtatgctgacgtcttctgatcttgcctattccccattacctacagtctgaaagaattttgtagggagtgtgtggtattctgcagaaggctattgtagcataacttagacttagccggcatttattgggcttagaatcacaaaatctcaagattgggtgactactggatggttatctaatccaacttccctccagaaagtctcccatacagtttttcccgcaaagtggccctcgagccataacttcctatgacagagtgcttactgcctctttgttcaacgctggtgaaacctcagtgatacttataagttaactttcattccttcagcattcttctctttagtgttaatttctttgatggtggtaccactttccaacttttatatgtggcctcttaaaatcagcttacccagagaaacttcctgcctagctcctgatttatgtagcttctcaccaccatgccctttctcccttcttataggggcagtttcacaattttgaagctccttgattcccttgagccattgtcctttccaaaacttgtcactatgaaaagtagactatgttttagcctttgaactataaaatctgcctttcagtaagcttagctccatattttgaggtctctagatccccccttagtatgcatcatgagacttgtattactcgccaagactctcatgactttcttcaagcattcagttttgtctaagaagccatcgtttgatccagaatggagtagacctaattatatctcctgtttttttggacttgaaatttacttcaagcctgatgataacctgttggtcagatgctctgccattaactaaatgacaccatcagcaaatatccagatagttgaggtcccagtgtcctgaatctgtggttttataatctatgtcagaagtctatcattttttttttcacctggctgtcatctggtatattctcaaaaggatatcacttttcttcttatccaggtacgtgccagtgtgcttcatctctcatgctcatggatctccatgcaaattgatctgcttttccaaaaactatttattaagcattattatgtgtctggtactatgtcaggtggtagagctacagtggtgagcaatggaaatctacgtgttttttgacatatgacactgcttttccacaatacctttcccaccttaaatcctatcccatgagcctgggtgatactcaggagattatttttatcatgtctctaaaaatctctgcttattttataactgatgatacatagacatctaaagagatgagggcctcacacagggattggccatgagagaagctttcagtgctgcgatctgaggccagtctgatctgacaccctcttaaaggctttcaagtataggccactgggttccacatcccatacctcttacctccattgtggctagtttctcatttgcggaggaggttagagatgttactctcttcccctccaccttcagtgtaaatttctcttaatcaggtcagctcacctccccaggcaagcaaacacatgtctctctgtcttcctgagctacccccgggaaagtctgcattattttagtaccatagacacagtctagaaatctgattcctatgggttgacaacatcctcatgacaaacccttcacctaccacatcatcttatttttataatcaccgaactttgttaggatgaagaactagagcactcaccaggcacccaactctgcgccaggctccatggtccccaaatgaagcttcctaggtctcttgtgtccaagccattcccctcacgtgaaacaacatgaataggtagagataagtggctttgtgacttggaacagacagtagcccaagaagaccacatgcctcccttctggccacgtgaactacatgaagcagtctcctttctgttcagccaagagtccgtgccatctcagtgcttgttttccttcctgtccctttatctggctctgtgcatgactgtttgagcagcctgtgtcttctccttccagccacacagagtactggtaacttctcacaggatattgcggtgtgcctccgtttacactgtctcttcttcctggatgctttcctctatcccctgcaatcacttcttacttacctgaaacttacttcttgtattactgcttaatgacagcttaacttccatgatacctccccacctccttctgctcaattctaggtttgagtatgtgccttcactaagtcctcccataatacctaagcaggtctctatcacagtccatacattgtttcctgtgtgtgtctgtttcttccattagactataatttccttgaggactgctcttgtgcctcactcatctttgtgagtacagtgccaagcatacagtagatgctatttaatgaaggtgggcatgtatgggtgaatattcccagtgtttcaggatgttttttctttctcctctggcttttctattctctgctcacctggaatgagagcggataaaataatacagacaggaaaccaggaagcagaagagaaccccagccacctacctacacttccccctcttagatgccctgcaacagagatctgtcctggggactccacctcatctttgccagcggtgtgcagctggcttcctaaaatccacccagagtaggggttagcttgtcagaaaaatacaaattggatgtcttctgcagggctttgcacagtcccctcagcacccacacttctgtgtcagggaggggatgcagggacacatctccttctaccctctgggagacttgtagtctacggctccaggagatgactccctggcctagaggactgtatccttaaaccactctctgctctgctggcttatgtcatcctcctgctcctttgggtagaagttctagagtcttatccacaaattgtcaccagttataggcttgagtaggcactaaatatgaaacatgaataatgacatgagccagcagagcagagagtggtttaagagtggtttaagggtcagagggaagggaaatgaaagccttggaggatttcagattcactcactcttctttaccttatagcctgtgctgcaaagtcagagtaaagaaacttctgttctgcctcattgcatccccaccacaacaggctgtaagcaggagctactccatgttttaatataaggaaactgaggccccaaaaattaaaaataactttatagtaccagctagccattggcaaaacacgattatacattcagatttgtccaattgtttccccatgtaaatgagaccacagattaaaattattattgtcaattaagaaaaaataaaagaaacccctgaaaagaggatctgatatgtgtctaactacctttaaatctccttgagataaattataaggtgttgtttctattgagccacccccatcaccagtttctcacaattcagtgctcagcaggcagtggctactcaagaattccagctggctgggcacggtggctcacgcctgtaatcccagcactttgggaggccgaggcgggtggatcacaaggtcaggagatcgagaccatcctggctaacacggtgaaaccccgtctctactaaaaaatacaaaaaaaaaaattagccaggcgaggtggcgggcgcctgtagtcccagctgctagggaggctgaggcaggagaatggcgtgaaccccgggaggcgttgcttgcagtgagccgagatcatgccactgcactccagcctgggcgacagagcgagactccgtctcaaaaaaacaaaaaacaaaaaaagaattccagctaagtggcagtgaactaatgagatttcatcacagagcatggtgaacgcttttctaaggtctaaatatgtgctctatagttgtcatggagggccaaagaaatgaagaaaataaagaacaatattagtcttaagaacttttttaaataacaaaaatgactgagttactaaggtcaggaactattctaatgcttttatactcatctcatctaattgctccaaaccccatatgaagtagacactactactactatcatgacccattttacaaatgaacaaactgagtcttgaagaagctaagtaacttgccaaagcacatcccagacttacaggcagtctggctcagagacctctgctcacagacactcctcttcctgggtctaattcaagaggggtgacgtgcgacttagagcagcctgtgggcttagtgattctgctgcttggtgcacagcaagacagaccataatcagcactagaataatagaatttttataagtgattaaagtaaaaccaggatttagagattgagagttgattgttaaaggataaatgatatttggaacatcttactggatttgattaaagtgaaattcaaaaaccatcacaaagagaatgattatttaccagtggtacttgaaggactttttttgtggcttaagtcattggcactccaatgcttaaaatctctgtgctcaaaaccagaatgtaattgatccttagaaaatcagaggttagcgccttctttggcaagctacttctgagctttgttacactgtaacataatcatcctttgaagactgagatctggttttccaggcttttttttttttcttcacatggtgcctggtatcttctcttgaacataatagatactttgagatgggtggacaaaccgaagtcattttatattgctttaggggctctgaatttaagaaagagttgatttctgaaagaaacataatagcaaagattacttaaacacaaaaatctcatttctgttcttaatcagctggacgtcaatacccaggttccagtccaagtgtcacactgtgcctctataagttaatcttttctggaagggaaaccaaatatgaaatagtatcaagaactgggacagtgttggaacaccctgcatgtcctctgttggccactacaaaaggttaaacaacaggagaggctggattagggtttgtgtttggaagtgcatttgaggcaagcttgacagttaagctcatggccagtactacatgccacagcaagaggacaataggagatttaaaagtgtgagcaggctgtggccaaatgctggaattcatgggctaagtagatgaagagtggatggagttaactagtaaacaagtttcatggtccttgaagagacctatttttttttatggtatgaatttaagatgtacaacataatgttttgatatacatacaattagtgaaatagcgataatttgatatttcatatatataccaaaatgattactctgggtgtattatttccttctcatgctgctaataaacaaatacctgagactgggtaatttataaagaaaaagaggtttaatggactcagttgcacatggctggggaggcctcacaatcatggcacaaggtgcgaaggaggtgcaaaagtacgtcttacatggtggcaggcaagggaccatgtgcagagtttataaaaccatcagctctcctgagacttattcactatcacgagagcagcacaggaaaaacccaccctcatgattcagttacctcccacctggtccctcccatgacacatgggagctacaattcaagatgagatttgggtggggacacagccaaaccatatcaacagggaagcaatttaacatatctgtcaccttccatatttaccctttttatgtggcaagaccacctaaaatttactctcctggcaaattttcagtctacaatattattaactagagtcctcctgccctacattagatctctagacttaactgcaagtttctgctctttgacctatatctgcccatttcctcctcctccctacccctggtaaccgccattgtgttttttgtttctatgtctttgactgttgttttttagatgccatatatgagtgagatcatgcagtactttttttttctgtgtctggcttatttcacttatcatcgtgttctccatgttgttgcaaatgacaggattttgtcttcttctttttttttttttttttagatggagtctcgctctgtcacccaggctggagtgcaatggcacaatctcggctcactgcaacctccgccttccaggctcaagcgattctccttcctcagcctcccgaatagctgggattacaggcgtgcgccaatacgcctggctaatttttgtattttttttagtagagatggggtttcaccatgtaggccaggctggtctcgaactcctgacctctggcgatccacccgcctcagcctcccaaagtgtctggattataggcgtgaggcaccgcgcccagccgatttccttcttttttaaggagatgtatatgtgtacacacacactacagcacattatcacattttctttatctattcatccattgatggacacttggttgatttcctatcttggttattgtgaatagtgctgcagtgaacatgggggtgcaggtatctcttcaagatgttaatttcattttctttggagggattgctgtgttgtatggtattctatttttaaattttggtggggtcttcatactggttttcacaatagctataccaacttacattcctcctaacagtatacaagtacctttttctccacaaccttaccacataagtgttgactttttctttttcttttttcttttttttcttttttgatacgaagtcttgctctgttgcccaggctggcgtgcagtggtgtgatctcggcttactgcaaactccgcctcccaggttcaggtgattcttgtgcctcagcctcccacgtagctgggattacaggtgcctgctagcacacccaactaatttttgtatttttagtagagacagtggtttcaccatgttagccaggctggtctcgaactcctgacctcaggtgatccacctgtttcggcctcccaaaatgctgggattacaggcatgagctaccaggcccagccttgaccattatttttaatagctaacaattattgagggcttaccatttctatgagtctaagcactttacaaatatttaatcttcataacaatctctgacatagatactactgttaatcccatcacacatactaaaaaactgaggcacaaggagtttaaggaactcgctcaaaatgtcacaattagtaagtcatgaagccagccagaacgcatgctcttaacccctgcactgttctgccaactctttggagtggtttgtttcagttgtcagtttttgtttgctgtctctgaaaatccttgctcttacagtgtcagccagagtcctgcattgatcacatggcctaacttgcctctctcagtacagtgactttttaatcttcggctgcaatcctttttttcctagactgtaaactccctgagggtagaaagtctgtctcattcatttgtgcccattttaatgaatgttgaaagggagcgtcaggaggggttatctagatgcctgtggatctagattattcatcatccactgggatctttattggtgttccttgtccccaaggagggagtcagcagcaacagaaggcagcagagatctcatcagtgttcatcaaacacatgttgagtgcctactacgaggtaaacagaacagacgttatcttctgtgccctctcagaacttaaggtacagcaaagaaacaaatgagataagcacaggtgtgataaatgcttgtttaaaaaacattttaaatgaaatgcttcgtttaaaaaaagcgaagaggctgaggtagagaataatggaggttgggtggggtaggacctactttaggtaggtaggcatgggaaattcctcatcgaagaagtgacattctaagcgaagatttaaccaacaagaatgacatagctaagaatgagaagactgctggggaagctccttgttggcaaagaaaacagcatctgcagaggctctgaggttggaaaggctttgtttcatctgtttaatagtggaattcagtgacactcattagttacctcttcacacattcccgccaaacacttgtccctgagtctgttctttttcattagtggttcctaatccagttttcaaaactgctcaatatttggagaggttttgaccagttgctctggaaacagaggcggttccaccatagccaacagagttcagaacataaattgtccatttatatccccatttgtatcttaagcttagcttgcataggactcagcaaagcaatatgtcaaattccttatatttgttatatctcttttttcactgactcaaagcatgaaaaatttgaaattaataaaacaattttttagatgatcagagattcttttttctaaaattttctaaatactatggttgtgtcccttaaccacaggcatggtggtttcactgcattttactcaagagaagattgcttacaaatatcacacaggagacctttctagtctcctgcaggagggtggctgacccagggaacctccaggcaagcaggacatatgccaagtatcctacatgtggacagtgtctaacttgatccgatctttctccttccccatgttttagttaagtcccctgaaagcccccattacccactgttcataaagggtctgtaaattatttaagagaaggaaacacagcctttatcccatcggatttttcctctcaatcacttgagtcttttctctgagcacacacacatggcccagactcactgtcaggggagatgtaatgccagcatctggtgttaatatctattgttgacattttgggaatgagaacatgagctgttagggaagatgtttgcttgtacctaattaatgtcccattgtatcctctcttgttgtcagctctgcctcaccatcctgccttggcattttcttttactggctaactttaaaagttaattatttctctgttgaatgttaaatgccaccggtttttaatgccgttccttggtgtgagttattagttatcaaaaatcaaaatgatctgtgcaattatcagctctttacctaaagccactgttcttgctaatcgcgtaaagtgtgatagcatttgctgatgtctggcaacatggatctttctagcagatttaagtttctcactcagtacattcctgtccctgtctggctttccttgtggagatcagatacaaagtcctggtacatcatctaatggaaacaattactgacagggccaagtcttcaaggcccattttgcttgaatctcaaatcactgttaaaattcatttggcaactccaataagtacagagagtaatgaggaacttcaaatagaatatttcctaatagctttcgtaaaacatgtcttggtaggagatcacaactctttctttacttgagattggtttataaaaataatagtacaagttccaactaacagctactaagtgcatactctgtgccaggctttgtcattagcttttcgcatggattatcttaatcctctcaacaatcctgtgaggtaaagtcttattattattcccaacttaaagatgagcaatttgaagactaaagacttgagtaattaatgcagcatcacatggctggtaagtcatgggccaggatccccagccagcagtcactgcagagctgcactgtcccaggcagtgactgtgactcacacgtggctactgagcacttgaaatggggtgagtccaaatgagatgggccataagtgtaaaacctacgccctgttcctaagctttagtcaataaaatagcgtaaaatgtctcgttaagaatgtgttcataccaattacatgttgaagtgataatattttggatgcattgagttacaggaaatatgttattaaaattaactttttgtttctttttcacttctttaatgtggctactagaaaattttaaatttcctgtactgcttgccttatatttctattagaaagggctgctgtgtgtgtgtgtgtgtgtatgtatgggtgtgtgtgtgtatgggtgtgtgtgtatgtatgtgtgtgtgtatgggtgtgtgtgtatgtatgtgtgtgtgtgtatgtatgggtgtgtgtgtatatatgtgtgcgtgtgtgtgtatgtatgggtgtgtgtgtgtgtgtgtgtatatatacggagagagatttctggagtttttcttgtcttaacgagtttccgatcctaaactattgaggaataggcacaaatttctgacccttcctcccctttctggttgtttcacttccagaaatccgacagaaagtacaaatttttacatctgagtctctaccaagagcccatctgttggctcttctcaagtatggaaagatgaaacactgacatgccaggcattaacgagatcaaaagcagggctaatgacagaaatgtggctgctgttaaagtgtctccagaggattatcggggaggactttttgttctccttacggcgaccccctcaaatgtcttccagagagtgcctctcagttccagttcctgaagtcctcctttgccttcctttccaatccttgtccaccactttcctggtccacctccctctctctcctggacgcccatctctggggtgtctgtgcagctgaggcggcccctctgttaagcacttctgacacgaggcaggtcttttttccctgccagtgagagcagagtgtataatggtgttgccctccaccggggatctttgagaagctttatggctctagcagacatgggggaaccaatcacaggcactgcagctgatatatgacactaatatagggttcacttttattctcaacctaaaaaaagatagattgttccaagtttagacaggctgtaaaatcatgtgcttctggaaccatgctgccttacccctgggaccactgtaattgctttacatctgtacaaaggttccttgtaatcgggctttctgccttcatttgtcttcttttcagcctcttagtaaagaccttaattggtcttagtggggcttttttcagttagtgcaactgtacctttagggctgaacaagtaccagacactacctgcggggagaagtgaggagatgggaaagacatcaatactcctttacctttaacagtttaattaatgtgctcagaacaaggagcagtttgaagaaattttggctcctctgggaccctgctacagatcagacataactagggttaggtggaattttctagatttctttcctgcttcagtctctgtgaacactcattagcctcataattgtctcacagtaaactgctgtatcaagtttcagtctgtctctttggaggatcaagttgctttatatcaatagactgaagtactaggggatgtgtgtgaagggaagtagcctctaatttcttctgtttcttagctactaattatttaataatacattttattgcctattaaaatgtggcataacttgcttgtcagcaaaactagatggaacctaatcatttgaggagaaggataattggcacttgtacagatggcttttattgccagttgggtttgttattgcagatagaattccttgccaggtttcttggttctgtttgtgggctggtcagtgttgtgagggggttacttactgtattacaacccaggcggttaaatgtggtattattgcaaatgcagtgtgtactcagttatagatcataaaggcttctgctgtgtaggtactttttttcttctcctccccccacctccccacccctggttttaaaggaccctagtgagttttgtaccacactgaaaattaccttatgtgctggaaaatgcatcagtggagactttgtttaaacaaagggcgtttttatgatggatagaagtggccaaaacttctggatttccatctagtaaaaatttgtgtaggaaaattggaccagtcccagttccttagtagaatttcacgaaggttttcctgttgcttcaaaatgaccccttgaggaatgttgtataaattccagaaaattgctcccaatgtttcctggagcacattaaaaaatgaaggagacacattgtgtgtgggatagtttggtaacagaattagttcactgggtagaacagaggggatcccaggtagttgggctctaagtgggaagcgttggccaacatttgtaactggaggcagatttggcaggcacttgggtaaggaacattttggtggtaatgaagtaggcaggaacaaaccgcgcaggggaagaatgcttcacactgccaggctttgtggcccagagcctagcattctcatccccaggtgcccagctcctctgccttcccaaggtgctcaagtttgctttctactcagatatggcccagtttcactggcaaccacctcccttatttgttgaaagtatggcttgtgttctgacccaagagagccatttaaaacctataatgatgtccatctttgtacgttttctgggtcccatcttcccatccattactactttgtcattgttcttatgtctcatagttgaactcctgaggtctaattgtgccagaacaacatgtctcccatctgtctggcaactctcttggcaactgcattcctcttcccttgaaagaggtacacactcttgacccctcccttccaaaagcctcagtgaagacctatgtgttttacctgtaaacgcacggcctttttaagtgtggaagggaatgtctagacttgatactttagaaaatcattatgaagtaagcttgacgtaggtagctttgtttcttaggggttgaacttgggaattactgtaatttaatacctacaataaatgtgttaaaatagggaagaaagccaattctgaggttttgtgtgttatatgaagggtgtgtgttatgcatcgtcattaaattttcttaagcaaaagctactagcaagtggaagccaatttaaaaggtgtatattggaaccagaacatgtagccagaaactggcttgggaggtgcaaatcctttagaccattgagagcatggaggttggcgagacctagaatgtctataaccttagtggtcacagtctacagtccactccggatgacgtggggctatggatgagcagatgggtgggtatgtgttggggacacgattttggacaacgttacatctgttgatttctttctgtcctgtagttgactcttctgagtttatttgtaaatcaccagttatgccaatagtattttcttatcagccctcaccctggtaacttttctcttgttgatctagatggacagacccaaatggagggaaaggattttaaacagtatgccattctttattaaatgaagcaccattaaaactacttccatctctgagtttcctttttccaggcccacgcctaacatttgcaaggcaagcatacacatggaggcccagcttacttctcttcacttctctttccagcaccatgaggagctttgctcctcacctcactcactccatacatccaagctccacccatactttttgccctcaccagcccagtaaacagctgcctgttgaccaccctcaagcctataggtgtgtgtaccaacagcatggcctgcccttgggaggatggcttccagggtaggaacctgcctatgcaggccctagaagcagcttaggccatctgggaagaggagtcctgtctccttggtgtgcaccacatggtcctaagggggaatgtgtcagctaggtgggcccatccccacgacttcatggattcttgccccatgtggagggacacagctggaggggccaagaaggatccccttatgcatggtctcaaggcaggggctggatctaacctgtattgcctctgccttttcatttcagtcttcataacctcacacttcatgtcctgcaaaaataaaatgaaataaaatggatccagctctccttcagaaaagctaaatggatgagctagttaactcatcagtgtctgcggacacaaggtgtgaaggcttagtctttagattcaatactggaaagtcagctggggtcttgtgcaaaagatgtgatgcattttgtgtaagaagtctgttttttccattagcatttaaagtatagcatactgctaaccagacacaaggaatgctctactatacagtgaaagaactatgcaagggaaaattgcagctgaaggaccaaattaggaatgttttcaatttcaagagtccagagaagaaacaaagcattatattgacatagtttgaacaaagtaaagcacttcgaaccttgctaacatttttaaatacacctttgttaaacctctttaaagaatgacgataattgcgttgttgttgttagtattcctaatgtccaaagggttgctgtaatttactctcccttcaaatttgaatatggttcataggcttctgtcttagtccatttcatgttgccataacagaatacctgacactgggtaatttataaataaaagaggttatttagtacaaggttctgcaggctaggaagttcaaggggcgtggcactggcatctgcttggcttctggtgagggccacatgctggtcaaaacatggcagagaaggtcaaaggggaagtggacacgggtgaagaaacccaaggggcgcccttgctttatctcagccggctcttgagggatctaatccattccctggagagtgagaacttactcacttccaaggagagtgttcatctattcttgagggatctgcttccaggacccaaaagcctcccactacaccccacctcccaacactgccacactggggattaaatttccacgtgagttttggtggagacaaaccacatccaaaacacagcagcttctaaaattaggttaagaggacacaaactctatccagaagccaatgtagtatgtgttttctattgtgctgctacccaaattttaacaatgagaattctgactttgatgtggcagtgatagtccttaaagtatttgaaggtctttgtcagttgccacttatttttgtgtagcagaagcacgggtttttatgattttgatcttcctttaaaaagatgtaggttaattattctgtcatctttatctgacagacaatggctaatattgtttattgtgtaaatgagacgctttactttcaaagaatgctaatattggctttgaaaggaaaaaataagcaagtatcttttttttaaagaaaaacagtctcactctgtcacccaggctggagtgcagtggtgcgatcatagctcactggagcctcaacctcctgggctcaggcaatcctctcacttcagcctcctgagtagctgggactaggtacatccaccatgcccagctaagttttaaactttttttctagggatgggagcctcacttgggatatagaaacccctagtgttgtccaggctggtctcaaactcctggcctcaagtgatctgtcgtctcccaaagtgctgggacttgaggcatgagccactaagctcggcctaagcaagtatctttaaatgggtccttgttagtcagcttttttcattatctcaagagaggagagtattaggagagcacattttcagacacactagaagacaacaataatacctgtgacaggtgtatgaccccggctcatggtggccttctcactcacctgactcaaagttgggcagcgggactaattttacataatcttaaatcttataaatgactttctgctctcttttccttacaccactgatttctcttccctggcacccttgctagtgagataaaacagggaacagagccaggaccagtgagctgccatgtggagtgctgcatctccctgaaggctgaccgtgagctgtgttcatgaaggactcattgtcacattctacccagaggcctctaagctgctcttttctggagtttaagcctcattcttaggacatgccgtgaatttgctctccaaaatgattccacacacaaaagtcctctctctataagccctaccagcattagccagagtcctcctggtattctttctcatctccacctgggttaaaaagtgagtgtgtagcagatttgtttaaaagggtcctcagctacacccagcctcccatataaaaatcgattcttggccaggcgcggtggctcacgcgtgtaatcccagcactttgggaggccgaggtgggcggatcatgaggtcaggagatcaaaaccacagtgaaaccctgtctctactaaaaatacaaaaaattagctgggcgtggtggcggacgcccgtagtcccagctactcgggaggctgaggcaggagaatggcgtgaacacgggaggcggagcttgcagtgagccgagatcgcgccactgcactccagcctgggtaacagagcgagactccgtctgaaaaaaaaaaaatcgattcttggaaaatcaagtcagataatgacgatagagcaaagtattttgctcgtgtcttttgtttggctcagtgttcatttgtcattacgcctcagcctccttttctttaagcacttgttgtgatctccgggcatgtgcttatgttcgtgactgttttccagagcattgctgggctgcttaacttttgatgctcccgtctaaataatgactaggttcctaagatgcctttacgcttcctagaagaatctgccaccatttgaattctctagcagcaccccaaaagtgctaaattatacagtccaaggaggacagtcatccaccaaagaaacaagggtaggatgaacagaaagggagaaagatgttgaattgagccaattcagggagtaagtaatacatgctctctggttgaactgatttttcatatggctaggtggctgggttctgcctgtgacttgttcaactctgcaagctactaaatagaataaaacttgctgaaatcagagaacttcaagaagataagttttatgtatatgtatatgtatataggcatatattcatatacatacccatgctctcacacactcatacacaaacttaaaggattctagtttagggtagacttaaccctttgacagttcaaagagagaagttagagtctacaaagtgattattatgtaaacccaacagggcctttcctggaaataccacaaaaatttcttagaattgaaaagatgacaaatgctgatttatgcagaactcgggacttcattgatagagcactgtcacttactacttccatcagcaggaatggttccttttaacatcagattgggtgtttacatggatgacaattagggctggtgaaatagttcaaataaaagaagaaccagaccggcatggggagtgaacctagttagttcccaagtattaaatacctgtcttccctcccttgtctctctcctcttcccttcctttctccactttgtttctcacttcactccctttccagactgttcttccctgtcagggaaggctgaacagagattgaaccacacaatacattgagattctgcagcagagaagacattcaaatcctgaaatactgtagtgggatctggttttcaaatgtttcttccccgggaaagtgaaacattccttgcagtcttataaaataagtatgttcgttgatatttcaagcaggagaaattcattttaagaagttggagtatttatatgtgacaggatagtagttcctctttctctcccccgtccctccctccctctctccttcctcccgtcctctcttccttcctccctccctttctctctcctctttgattttattttttaatcagaaagttctttttaaaggaagagaaatatcaacattgtacattctaacattccaaatgcttcatatagttccttgttttattgctttaaacattttttcaacagatacttaaggacatttttcaggagttgtgcaaggcatgaacacctggagatacgtaagctacagtggtgaacatggaggtgtccacagtaagcgggagagaggcaggtactctgcagtaagagacgggtgttaaagaaagataaattatctcaataactctggaatgacatcaaccccacttagaattaaaggaacagaagtctttgtgataaatattctctcagtctttccctctctgtgtgtgtataatatttttgttaatacacagatggtaatctaatgagatgcatttattcctcctgatatttgtaagtacagtgtatcttttcattgtattaactgttgttctacatctgtttggatccattctgtggattcaaaatcatgtagatcaccagtctctaatggttggacatttaggatttatctggtttctcatctgagtgtttattagatgactattggatttccttagacatattcttggaaatagaattgctatatcaaaaattatggaaaatctgaagctattgatatacctaatgctagatgacacattggtgggtgcagcgcaccagcatggcacatgtatacatatgtaactaacctgcacaatgtgcacatgtaccctaaaacttagagtataatataaaaaaaagaaaaaaaaaaaaaaaaaaatctgaagctattgatagtcttatttttaattgctctaaaataagtattaatttcttagaaagaattatttatttaaattaagatatttatgcagatgaaatacccaaatattctggtttgctgtttatttttatcccataactcaacgggtatttatataattaattatacttttcaagtttttcacccctatgttctacatatattgctacccatgtactccatactctattcttttatgcttctttgaattctgtaatttaaaaaatcaaagcaaactaaaaacaaaacaattcagctcaaataacattttttcctaaaaacctaagtctcccagcttctttgaactcctccttctatggactcttacagtcctcctctagcctatttatctcatttgttaattagctagctagcttttatgctatgttttattattagaatcctgtttcttttagtagattgcaaactactcagagccagagaccatgccttgtgttatttgtgtacacagctagcagagcaccttacacatcataggaatgggatctattttagtgattaatctgttctgtttttatttcagcagggtttgtggaagggcatggccaagttgatggtgatcatatgccttcaaatatcatgttgacaattatcacgttgatatggaaggaagggagactggcttactaaaaaagcattctagttgtctagattggaaaaaaatgcatttagtctttcaactgtctagcacctagtaggcagtcagtaaatagaagcttaaaaaaaaaaaattaggccgggcgcagtggctcacgcctgtaatcccagcactttgggaggccaagatgggcagatcacgaggtcaggagataagagaacatcctggccaacatggtgaaacccagtctctactaaaaatacaaaaaaaattagctgggcatggtggcacgtgcctgtagtcccagctacttgggaagctgaggcaggagaattgcttgaacctgggaggcagaggttgcggtgagccaggatcacgccactgcactccagcctggtgacaaagcaagactctgtctcaaaaataaataaataaataaataaataaataaataaataaataaataaataaaaattaaaaagggctcaaaagtccttttaaataagtatttcaatttaaataaatttattaacttctttttactccatttccttgtctaggaaaggtggatcagactcattcattataaagaactctttctgattgaaaacatttagttaactctctctggtcatgggcattcacatattggagacagaagcagaaccagttgtgtaaacactgaccaatgtgttcaatgtagttttaaggaaataaaatattttttatttatggataagtcttgatactaaaatgctaaaaacttttcagttagctggctggcacatatctctcagcagtaatactgctgtaggtaaagttggcgtgctacttcctttttcatcaggtacagtagctcagtttagacatcatatgtaaatggagaaaggtactgggaaagcctattaacaaaaaggattagtaggaattttaaaaattaactgtgaaaaaaattctttctgctctaagacatcatctctgcagaaaagatatttggtaaaggaataattggttcagattttctcccctagtatctttactatctgccctgaatttccctctttactcttcagaagagagggtcagttccatcaccaacccggatacaaagattctcatttcccgttaggtcatagcatttagaataatgtttattttggtatttttaaatattttgtggttttatgaggaaccaatacatgtggtcaagcattcccttattaagggaaataaagctcaagctcagaacagatggagaaacttgtccatacatttgcatgtgacgtgtggtgtagaccagaagtttaaagaatattatattccaatgacacatataaagcacctgcaattgacagagaacgtaaatggtattttttaaaggctagaagttcatagactccttccattcatgtctgacatcagcaagctcttaataatgcagtgtgtacttatctattgatcagaccatttaagtagtaagacatgagaaagtagacactattgtctggtaattgaccatattggagagttaagtgttctgacaaggaactaagtgtatttaaccttcagataagatcaattttaagataatgcctactttagtaatgaaccaaagctgttaagaaaactttgttcttctaaagcagtgctgttttgatgacaactatcatagttttaatgaccagatttgttcctgaccagattggtcttccagggcaacctggaaaggagttactaacattcatcctttacttaccataaaagctcaaatggaaagagacggtgggaagcagcactgcccaaagagccactgattggtttaggagacatcttttgggtacctaccataagccagtcatcatgctatattgtagggcttccaagtttagtaacatatctgacttcaagaaacttatgtttcagtaaaatggttttccagttgtattttatatgttaaatctctaaaaccaaagcttatgttagtccttcatttattaaagagagagagagaggaagttctcctatatttgcctctgagtcttttccctgtgacctaattgaacaccacttgaaacctccttctcttagagacagatccataagcaaataacacattataagttatataatacaaacatgaacaaaattgacaagagaacacaaagaaggacgtagctaaagcggctctgcatttaggaaaggcttcctagaggaagcaatgttgaactcttgtctcgttggatgagtaaagctccccagagagagagaaagtggaggcagtgtgagcaaagcaggtgaaggctgtggtatgtttgtggaagtaggtagccctacttatatgtctggaatagaggcttttgaaaagaaatagtgagagataaaacaggaaagtagattaggccccaaatcctccagaggtttttaagcagaagactaaaaatcagatttggatatcagtgaggtgatgctgataaactcggggaaatcacaggagctttttaagaagagagttgatattcacctagggcagcagtagtgacatttgagaagaaggaatgttccaaaggtattttagaggtgatagtggatagattaagtgactgaccaaatgtggagaacggagaaacaaaagaggagaggaggtaagggtaattctgagacacctaaccccaaagactgcatgggagagtatgtccaatacagggggaggattgagttgaagatgagaataaggaagaatcagttcattttggagatgttgagtttgaggtacctgtggaacatccaagtggagaactttggctaacaaagtttgggtcctgaagataaaggttaggattagaaatactgatttatgggctgggcatggtggctcacagctgtaattccagcactctgggtggctgagatgggcagatcacttaaggccaggagttttagaccagcctcaccaacatttgcgaaaccccgtctctactaaaagtataaaaattagccgggtgtggtctactcaggggctgaggcacgagaatcacttgcaccaggtggcgcaggttgcagtgagccaagatggtgccactgctctccagcctgggtaacagagcgagagtctgtctcaaaaaacaaaaaggccaggcacggtggctcatgcctgtgatcccagcactttggaaggccaaggtgagtggatcacgaggtcaggagatcgagaccatcctagttaacacggtgaaaccccatctctactaaaaatacaaaaaattagcccggcatggtgatgggcgcttgtagtcccaactacttgggaggctaaggcaggagaatggcgtgaacccatgaggcggagcttgcagtgagctgagaacgtgccacagcactccagcctgggagacagagcgagactctgtctcaaaaaaaaaaaaaattgtaaaaaataataataataataatactgatttatgaaatcactgatgaagaacgtagttttgggaatgttcactaatgatggctagaagaggaatattcatcaaaggaagcagtcagaggtattatttgatatctaggaagcagtagttttgcaaaagaagagagttctcagaaagtgcaaatagcaatatctgataccattgggagaacagaaagatatgaatcttctgaagaccactggctttgctagctattatagaaggccactgacctttagcaacaactttttcaggagaatgatgagagtagagactgggttagaatcattcgaaaagaatgaaataaagaaatggagacaatgaatgtgtgtattcagtgtttagggtgatgagaaatggagaactctggctgaaaagagaagcaaagtggagtgggtgtgtgtatgagagtgagttgaatatgtatataggctagggatacctgtatgtctctgggatagtaaggggtttggaatcacactcgtggaagatcaaacctctggcctactatttaatagatatggaccttgatcaagttcttctgtgagcctcaagttccttatgtataaaatgagattagtactacctacctcttggagttctttaaggatttaatgaaattatgacatagaaaacacctagaactcagaaggcactcagtaagtattagtaggattttttgtttgttcattcttgtgaggaagggagatattaaaggtgcaagagagggaaaggatgatgcctatgatgtcagagaaaagagatgagtagacatgggatttgagtagaggtagaggagtagtttcaaagtgagattggacctattttcctgggtaatagaagggaaggacagtgataaaatgaggcattgggcaggataatttaggttatgttgcagtaacaagtagccctaactctaagtctgttaatgcaacagaggttctctattcatactgtatggccaacattaattaggaagggtttctgttttatctctgcccctcagagacccagcctgatgggagctccatctcggtatttgcctctgcagtcatcatagagcagtcacatggctacctctgacctcaggaggccaagaaagtgcctggaattggggaagcacaggaaatatttggtgatcagtgctcaagaccagaacaatgagtagagctataggtataagtaaatagggaagggatggcagtggcttctctttttcccaatgaaggaggcagcaaaaatatgatccaccaagagcagcgtgaggggtcttacaagagtggtaaatgtttggaacagctgtttgttaaaataattaaacgggaacatagcagcaaaggaaaaggaagttgttctggttaaatatttatcattagggctccatgcagaatgaaatggtaatatagctgtgattcagtttcttagttcagcttaaaattagaagctgcccatcaataattttcccaagagagcgatttctactgtaacagcacatagcctagagaaaaggaaacgcacaaagaacaggctttcttggaatgggaagagaaaccattgcagggagagaatatgagagagaaattgattgtacatctatccctggaaataaaagtgagttcccttttatcagtcattctgtaaatacatctgctgctggcctagcactttggcactaggtgtaatcgagagaagtttaggactttattcatgttctcagagaatgtgttgtttggtcagtggggcaaaaaagctcatgccatgagtttgagggttgtttcatatatgtcttttattgccctaattgctataatttttggggaagagtttcatggaacagatgagattaaaccgaggccttgaagaatagattaaccttggagggtgtcaaaggaaggaaaggagggcaccagagtgatggtatcattcaagggccaatggtgggagtgaaaatggtttctaggggaggcaagaaggagagtggccagaaagaagaggagatgattagatcaagaaattatgggacatcaggttgaactgacaggttgcaaccttattataaggagttggtacaatatggaaggaaagcaggaattagttgttgcatgagagaatggcattgtgacaaggtacacttggtcagttgggaagaacataatgagaaggattagttaaaagacttcataataatccaggtatcttctcctcatctactccccatacgacttgaatgacttcctgttaccttcagaataaagtcccagtctttagtcctgcttgcccatccccattttgaagagactaccagatatgcaaagggtactagaatgaggaagactcggatatgttggaaccaggagccagaccatggatgtacaattagattccaacaatgctatcaacaggcaacatttaggagtgcagcctagcaccttgcaagggctgtgaccaagtcagacataaccctgccctagtaggatgttggaggttaggtgggctttccaacacaggcatcaaaggagaaacctctttattatttttttaaacagctttattgagttatagttcacataccacacaactcacccacttaaggtatacacttccatgttttttaataaatgcacagagttgtgcattcatcaccataatcaattttagaatcaatttcatgacccaaaaaagaaaccctgcactccctatccatacctccttccttgcccattccactgccccagctctcagccctaggtaaccaaccctctatttttcatctctatagatttgcctattctgggcatttcatacaaatggaatcatacaatatatggtccttgtggctgatttctttcacttatttttcactggttttaaaggtttatccatgttgtagtatatgtcagtacttcatctctttacattgcctcataatattacattacattgatacaccacattttgtttatccattcattaattgatagacattgggattgttgctactttttggctgtgatgaaaaatgctgttacaaacattcatgtgtaagttttttgtggatatgttttcatttctcttagacatatacacatcttatagtggaactgcagagtcactatcatttaaccatttgagtaattgccagaccatttgctacagtgcccgcattttacatttccatcagcagtgtatgagtgttctagtttctccatatccttgctaacacttgttgtctttttttttttattatagccattattctagtgggtgtgaagttgtatctcattgtggttttagtctgcatttccatgatcagaagttgtattttcaaaactaaggcataagtgaaagcatgtttgagggctttgacagaagactgagaaataaatattaagagattgatatggataggaggatttcaagcagttaaaggctaagaaggaattggacgcagccttttatagtatgcccagtccgtggtgttgccatgttccatggaaatgaataaccagaggttgctattctcattctaaccattctcagtccttggcaacacgaagttaggttcacctgaaaaataattttaaatataccagcgttcaggccctatccttggccaactgaataagaatgtttggggatatagcccaggtatctgtagtttttaaaatctcctcacatgattctgatgcacagtgagggttgaaagacaccattgtaaataattcagcaggattaaataatagaatgaatgtattgattgcatgcactgatcagataaccatctgcctttattttgacctgtaagcttttctgagacacctgctaactgaatttgatcaaacagatgtaagacataattgcagtgtgcagtcttctccaactaatgatagaggaaaacctagcgtgtggttcataaaatcaattaactatttctccccaattaaaccccgaatttaaaagttttgtcacagagttgagttccttcatttttttcccatttatattggctacacatgaggcatttgtttatttcaatgatttcaatctctttgagttcaacatacagtgatgcttttcaaggtaatgaattagttcattgattagtttatctattataagacagtaaattgatgtaatgagtcactgatagatatcctagtggttggctcatagatacaagcattttttatggttgtgttgatttgaacacgtgccatttctatgcaaaccttgacctttgtaattgacctgatgtgtacagatgacagcaaatagatcaatcagggtgatgtctcattaccatatggccagtgatttctctaggactaaagtatgttttttctctttagggattgagggccatttttgtcttctgttaaaattctaggtctagtcacaaaactggaaaggatgggaactaaagtgcaatactcttctgctagtttggcaccaagtttccaatgctgaaaagaatgattttccattgtccagactcttctttagaggggtcctatgtccccaacttaaaatttgagctacacagtttcagaaaatgaaaactgatattccagaaagaagaggtagataatgcagaaatgtcagtaattcaacatgttctgatgccaacctggccagagatggctttggtttcattgtagattgagatttcttatagaaggtttaaaatgcagggaaggtcaagttgagttttgtagaggaagatatcctagtacttttttagggaacccgtatttttgtcttaatggaactgctaaaaagatgtgcagtaatccaggccttctcttcctctcaaaaacaaactaggcactggttgtatttagtctcacattcgtttaatctagagtaaatggaagcctggcatatagatcattgatgtaaagagtatcatggaagaaattgaaatggaaacaaacagtagggggaagacctgtctggtagcacatcctctccatctggctagccgtcagatttcctggccatttctcattgtacacttcatctttgcttgcttcttacttcctttctttcttttttttttttttaaaatacaagtattttaaactgcaacctggaaagaaaacgagaggtatataacacatccttaaaaacaaagaggaaaaaaaaatcaaccctgttaataacttccactttgagagtttgggctggttgcaaggcccaggggactaatctgctgaatgtgggaggatatggagccatttgtcctaggagaagcactacattaaaaagaagaggaagaagtcatgggggaagggcgagggtctgctgatgaaagtagctgtcaaattagcaggtctggaagttgtagtgcatattgttatgagctgctcaagttcacaccagagcaaccagctccatccatctttctcagtttacattttaattggcttgtagttaagttttttaaacactgcgagattgctgacatacactgcaatatcacgtgaataatttatggaggttgctcaagacaagcttttttttttttttatgtgagaaaccaggggggagtgggggaagaaggatgagagggtctgtgggaggggccaggacagaagagcagacacaactgcatgtgctgtgctggatgttaaatgtttctgctggtgtaggcagcagcatttgggatttcagggaggtttgtacaatacgatcttattaataacaattctgtcaagagagcacccgattaaattgaattgggtttatgactccctcttggtttctgaaaatgtgtggatataaaacctctgcgatgtgaatattggataacaagggtaggtttctttatttatttatttttttggttggttttaatcattcctcctactactgagaatttgcttgtttataaatgcaggggtaggcatttttcccaaactatctttctgttttctgctctcaaaataatctagagaagatggaactggcatcagtgggcagttatcctaagaacgtgactgcttctaggcatggtttgctggacaactctgagtctagaatatcatctaattaacacctgtgggacaatcctcttcatctgctaaaatatactttttttctcattacaaaatgagtaaattatataaaatgtctagagtacaaagaggagaataaaaataacctgtaagtcctccccctgctaataaaattggtatggtttttgtttatatccttctagtcttttttctgttcatatttagtgaacataatttagtgaatcgtatatactgtttagaagtcatcttttttttttcactaaacattacatcacaagcatattcccatgaatggtctatacggaatgtcatttctaatgattgtagtgtgtatgtgtgaattaactatactttatataacctatctcctgcaactaaaatgcagtgttagtttataatttttatccattttagacaggcaagttataaatatattttttggtcaaatttcagtatacattcttgatcatttctttaggaaagctctgagaagtagaatttctacaagaagcagagtgagtctgagggaaaaaatcattaatgtctcaagaattttgtctcgaaaagagggataaagcacattttaaattaatgaaattaacagtttattctatttaaaaagaaaaatgatgataacattcaacatgaggttcttttaaattattgaattttttgccttgtggggtttcttaaccacaaaacctatctattaggattaatggaggctattttttctttaccaattgctatataactacttaagacttcatgtaatcagctgagatgctacaaatgtattgcctgtcaactccagtaaaaaagcgggcagttaattaaagggatgtcttgctgttaaacaaacttgcagtcaattgcttgtaagtaacatttagtttgatatgtagtcaaagggcaggaaaataagtgtttaggcaggactggctttttgcaacgtaaaaagagaagtgattatattggggtcaagatgagtaacctttcaactggcatattttccttctaaaaagtatattcacatatcagaagaaaggtgaaagacatataaggccttaaggttggtcagtttgagatcttttccacttacagtaactaagtcctcatcttcttgcatcccttgaagacactgttttaccctaatataaagcctggctttgaggtcagtgtgtgtgtgtttggacatgtgcgtgcacacagaccgtaagtagatgaggcaagaactccctaaaccaagtgccatactctgcagatgggaaactgccatccatagacccagtagaaaggctgcagtagcacagcagcacttgggacagctgctccaactcaggcccattacctgctcctcctaggagtgccccgatgctccctgcacctttgttcagctcttccttgataatccaggataggatcgcacagtttctggttggtgagcttgtagtcagaagcccttttcaagcttaacactttcagagggagggtttatccaaaagacaccatactgattcaatatgttaaatgttgaaatgcttgtgaaacaacgcatatatgatagagatttttttctatctcaaaatcacttggatatgagagaccagagctattagaagccccattgactttgctttgagattccattggaggtcattgaactttggagcctcactctgaagccaagaaatttcaactttgccagtaaccacattaaaatgtgtgtacctggcaatggtgaaccagcctcatttactggtttccattctttgtattggctattcattatttcatcaacaagaatttatttttttactgccaattttacgtccaactaggtagtatggaatgcaagagaaggtgtaagttatggccattcccctcatgggccttttaataaagcaaagtaaatatgtaatccacttacagtcagtcaagagcaatatttttatttgtaatgattccacattttagcttaagaaagtatttattattctgggaagaaaaacattggctgaattaatggcagattctgaatgggctttgagcaacatttggaatacaagtgtgtaaggtggggttggtgagatttgctttatttcctgaactgctatgaattagcaaattctaaaccagctgttttccaattacatacaataacttgtgcctacctaagtctgtctttctgccaagcttctacttgcaactcattttaaaacttattcctaaatacccccaaaccagtggaataatagtaggcatcaccttaaatcataatattttcacaagaacatgttcaatcttgaaataatggccaggttttagaaagtgggaggtgagaacggaggagtagtttgttttttgtcgttaaaaaaaaaaaaaagaagaagaagtgcttgaatgagcaagttgctcagatttctctgctgctttcttcccagatggccaaagggagagaacactttcactgaagaaagggataaatgaaaaggacacctctgtatccagttatttataggatgataattgatgatagggttggagttttaaaatgtttccgtgtgaacatcttgcagttcgctttacctgccttttctgtggtattaaacacattgcttaattcctattttcattttggattggcaaatttctttataaaaggtcagatagcacatattttagcctttttgaccacacaggtctctgacatatattctttgtttctctttttttttaaacaacactttaaaaatgcaaaaactcattttaatttacaggttgtataaaaatggactgtgggtgagatgtggccggcacaccgtagttggccagctcatgccttagagaaacatggggggatatcctgggtgggcatgagtatcagttaggtcagcaagatttccctcttactgctgcttgctttgttctcttctggtcactggccgtctcaggagctagtccctggagccctgctctcctgtgtgatgtaatggtgtgaaatggtgtttccagtggaaggcctgcaggggtaaatgctgtctctaattaacctgttcatttagtgctattatcctttatctcgaatgcagttctgctctgggaggataaggaaagtgcttaattatagtaacagtttcacattgtctttgtttgcatgatgaagtacaaaaagcccaggagatgaagctgtcagtcactaagtgtctttgggagcctcttggttttttgcatttaataatcatgctctgttattgcgtgttgttgaatgaaacctcaggtcacagtctttgtcaatgatctgacccaagacatctggcctatgtaagttatggctaatgtccacgaactggataatatcattggcaaattgtggcttcattgatgcctgtttatttgctttttgcctcaattagaatactttggattgttatttgtctttttactgtgttttctaactccctaattgcatgttaagtacctgtagtccagggaatgtgccccatgcttctttgaagcctaaagtcttttggaataccatcacaatatttttataggacttttttattaaccacaataaaaaatgtcctataaaaacattgcagagatcctcatactcaaactctgaggagccaaagtcagctgaatggtgtttgggtctcaaacaaacaaatataaatatatatatatatatatatatatatatatatatatatatatatatatagtgatatatatatcgcaataaaaatgttgtataaaatattgtaatggttaaaatggtaaaccatttatatatatttaaatagtttatatttaaactatttaaagccataaaatggcttaccattttaacaatttttaaatgtatagtttaatggcattaaatacattcgcattgtcgtacagccatcaccactgttcatctccggaacatttttcgtcttcccaaactgaaactccatgttcattaaacaataactctccattcttccttccccaaccctgccaaccagcattctacggtctgcctctatgaatttgactactctaggtatctcataaaagtagaaacaaatagtatttatccttttgtctggcttatttcgcttaggataatgtcttcttttttttttttttttgtgacagagtctcacttgtcgcccaggctggagtgcagtggcgcaatctcggctcactgcaagctccgcctcccgggttcatgccattctcctgcctcagcctcccaagtagctgggactacaagcgcccgccaccacggctggctaattttttttttttttgtatttttagtagagacggggtttcaccgtgttagccaatggtcttgatctcctgaccttgtgatccgcccatctcagcctcccaaagtgctggtattacaggcgtgagccaccgcgcccggccagcataatgtctttaaagttcatccatgttggcagcatgtgtcagaattgccttcctttttaaggctgaataatattccattgtatggatatgccacattttatctattcacttatgaatggacacttggttgctttcacattttctctattgtgaataatgctgctatgaacatgtctaagtcctgctttaatttcttttatgcatactcagaagtggctattgaaatatttttgcatctgccaatgtaacaacttttaagctctgtggaactttaaatattcttacggttctttcctatgttatctgcctatagtaaaataaattttataataaagaattcagttattagctatgatgcacaaaaagatctatgagaacaagcatgtattcatgctatgtaccaggcactgagattagctcttatgtgaattaatttacttaaggcccacagaatatgttatctgtgtgctacagaaaaggaaataaaggcttagagaggttgagaaacttgcttaagttcacacagctagtatgtggcagacagggttctacttcagagaccatgtttgtagataccatgaagccattcagaaaagtggattgcatctatattcctcattatattcccagcatggttagcagaaggcttatcattttccattgcatgatgtcacttttaaatttcaaaatcaaactacataaaataacatgtaaaattacttgaaagctttaaaagtgctatacatatgcagagtattaacagtaaatcctagtgatggacagatgttaaaagctataagtatatgattcagaaaccatctaagaattttaaactgtggtctaattattatggaagcttactggagcctatccttgtgatttgttagaacattgtttcatatgccattttattcgtatctcttccaattcttattaagactagcactgctgttatgaatttcatggctttttttttaagttgctggatataagccaggttatcatataatgccctttactacctgtagtcactttgggataggtactgtgccttcaaccatctttgaaatcctacaactcgtaggctaggtttagatgccaaatagctaaagagctatcatgttgaaaaactattattagggcgggcacggtggctcacgtctgtaatcccagcactttgggggagccgaggcaggtggatcacttgcagttaggagttcgagaccggcctggccaacatggtgaaaccccttctctattaaaagacacaaaaattagcagggcgtggtggtgtgcacctgtgatcccagtgactcagaaggctgaggtgggagaatcacttgaatctgggaagcagaggttgcagtgagctgagattgcacaactgcactccaccctgggtgacagagcgagcatccgtctcaaaaaaaaaaaaagaaagaaagaaaaactatcattagacttaatttgtgtcatttcagaggacagaattgaggccattctgtgtgtgtaggttctggaaggacacatttcagtgcagaataaaagatgtagttgtagcttggtagactggctgccttgaaaattagtaaactgtcaacagaaatattcaaatacaggctagaaaatcctctcaacaaggaagtaaaggggattcctacactaagagactgaatttattaatcttcagacttggtctattatgacatttacttgaagtgttctaagaacttcacctttaccattgtcttatgtggtattgttttcttcagcaaaagacaggagctaagaatttttggttggcttatttgctgtaccagaggcaaataactgtgctgtgttggaatgacttagaagtagaaaatatttcgatcaggtgcaaatcatggtcaggaagacaacaaggtcaactttttaaacccagattctccagggtgaggatgcatcatgtacaaaacatgactgacactaagcaaagagtctgaagtggtttgatcagtatatattgattatttgatttattgactttgctgcagtcttcttggagctcttcagcatccagtactataaaactcactttttcattgtaacatttgacttgagcaaggacttaggtatttggcacaaatgacattctctcctcttttctgattaatgtggctctgggatcaaacaaagttagtgcaaatactggaatatttgctcaaatagagaccaaaagggcttaaaattcagtgcaggtagaattgtttaagtatcagaagggcagactttggtaatttcagctgcatatgttggttcttatttcattttggtagaaattgagtactggagactgcctggaagccagcctccagcattgacgtctgacagtaaccgcaaaagcagtccccctttccgctggcagagccaggaccacgtccgtggctgtgatctcaggggagggctcccagtccacagcctgggcttatgactgggaagcctgcttcttgtaaggtggggaaaacagagccaaactgaccccacagaatttgaacttggagaaactgtcgaatccaaaggatccatcaaggccagggacaacgcctagtctgaactggcgaccatgggctttttcagagccaggtgtcagaaatgggtaaatatcaaattgtgtctgattaaaaacaggagggagcagagctccccttactcactgaggagccaaagtcagctgaatggtgtttggctccaaataattcaaaagccacagtctcatgacccaaccaaagaaatattcaaaactagcctgaaatagaacagcctgttttcagaaatatgctatcaaacacatttatctttggctaaaaaacgaattaagtagttttctcttaaaatggccagatatccattaacatagaagagtataggataaatacctcttatggagatggtcagattcatgatttcatttaagttaaaaatattggcaatgataccgtataaataatatttgctctcatccaacacttttggttgaattagtctattacctggggaaaacactgaaataggatgaaataatactaagaataacattagaattatatatttgaaaattactgattatatagctatttcaccaatgagatattcacaagataaagaagagggataatgatagcccaagtggacttcccaataatgcaatagtgaagaaatcaaaatccagccaacatggacatgtcttatatcttgattggaaggtagataacacagtacatacatttgtcaaaactcaaccaactgtacactttacagctgtgtgttttcctgtgtacaaactatacttcaaggaaaaagtcaaatcaacttatttatggagctacaatttatgagaaagtacaacattaagcaagccttgggagaaaaatttcccagcattcaggaaacttgcaaatcattcgttagccctagacacaaatgtaagaaaattttaataataaaaattaagtcaatgatgagggatttgaagattcttaatattgtggacctaaatggagcctctatgatcattaaccctccagttacaaatatggtaaaacagacattaagaaaattttagaaaattttccaaagaaaatcagagtcagaatttgactagatggcagaacgataagcttaaagctccttctcctttctcctttgtcacattgacttcctcctgctcctacctgctaaatattctcaagggtctgttttcagctctctttacctttatttttatattgcactcccgttgatcctttaatttcaaagttgttatttctttattcagtcagtaaacactttttgagtgtataccgtataccaagcactgttttataggtgggtgatacacagttaaaccagaaagactaaaagtcttcactcacagagcttactttctactaatgtctgtgtacctggaagccagatactgatttctggaacaagtattctcagcagtccagacaccattgccctacaacttcccttgcatatcacgacagtgtctcaagctcaacgtgtctgtaatctcctcttctctccaaatcatctcctcctatttcccccagcctgaagatcgtcattggctgtccttgttgaatctctaggtcaaccaatttgaaaaactctaaactcttccaaattgactttttcttagatcagttcagaatctccatgtttcctcacttctttgtaatgtccagtagctttctaactcatctctctactacaatccccaactctgatgtgtcctacacatcactgcctggctaattttcctaaagcacacctcctataccaactttttcccaaacacacacacacactctctcttgcttttcctttgatttcatctgcctttcaaattaaatggaaattcctctatctggcagtaaagactattgaaagcatggcgccaccctccctttcaaatctgacttctccactacaggtacctgtacctactccagctgaagtggatttttggctgctcctttggcaggccctagttctctaccactctgcctttgcccattgtgtttctatctggactcattatgcagctttgccccactccgtactcatcatcatcctctgtgtacaactcactcactgtcttttctaagactcctttctcattctgatcagcatgatttttccttcatttgagtgtagtcatcactcactgcattgcattatggtcattctcttccttttttattaaaacaacacgatggattttcataaaatgacacatccttattgaaaaaaagtatacagaagagtaatgaaagtaaaaaccacctgaagctgtatcacccagagatatctggttttgaacatccctctagatgtttctttgtgtgtatacacaatttatgaagtctatatatttttccagaactgagatcaaattctaccttttttcatgttgatatattctgatgctcttttaatgttgatcaatagaaaactaagctataatttgcagtggctgcaaggtatctcatcatttggctttaccataattttttgctttttgttgttgatttttttttttagcttgtgttcctcccagtagaagatgagaggaggaggtgcttagcatgtgttctgcccatgtgcttagcacagtcttgtaaaatgcaagtgagcagtctgtcatggtccttgacagggactgtttgtgacttatcactccatgcggtttgggacctgggaaaatgtttagagatcttgagaacaggttagagaggattgacctaaagtcccatagtaaaattttagcctttaaaaaaaacaattattactgctttgaacagccttatgcccccattgcctgtaagaaagccattcattatttcttgttacataatctgcagagagcttattcacttagaaagcagtgcattcatcatagcttctatcttatgagtagctaaaagcagaatctgttctgcatctttgaggcattcttcgcagcacagacctcatgctatcactaattagccagagcattcccagccaaaaatcccagtgcctgtccttgacaaaaaagtctgttttttccacagtaagggtgaaaagcctgcctctctgtctagggacatctccataagacaagcaaaaatagggtggtggtgagctctcagatcagccagcgcaatgaaacagactgcagcctcttaggagacttactgtttgctgcctccctttctctgcaaagtgggatctccattagacgatgcctttgtactctgacaaaatacctaaccaccatgagacaagccacttctgcattattctgtacattgttcctatccattccccatttttggcttcagaagtcatcccctagccaacttccagccacttgcattaatgatgaatgcgattagcagcctatgctagtccattagggaaaagaaagaaagaaagaaagaaaaaccatgagattgtttgcttgtcactgggaagtgaagcttgacgggaacatcctcactgtccctccccaccgcccctcctgccatgtgcctgtgatctgtgcgcatgtgctcatggttgcccgtgttccatggctctgccatttgctcagtggggggacgttttcttagctgagcagtgcaccactctgcctgagggattgagaacatattgcttggcaggtgggcctactcagacgcactgactgttgtttcagcactgacagggaacatacatcatgcaggcccattatgccagcataaatccatggtaacctgttcaaagggctgcaaccagcaaacaacgtgtttgggtcttaataggtgatatttttgaaacatataattgggatctgagaagtaattctggatgacaagccactccttctgccatcctaacagaagctgggcctacagcaaaataccactcctgtcatgctgcacaaagatgactgccattccagctcagctccaggctgctgtgcacggcgccaacggtgccaagagcttgtctgtgcagggaaaagagccctcaggtttgagggctttcctttgtgccttgttgctctggactgctggcaaaaggagctcctaggattgttgatagacaatgtcagagcctctttcttcagcctactattacaagtttgaaagggatctagagtttgtttggcgttgggtagtggacagataatcctcaaagcagagggttctgatcaaagctatctttcatatcccccactggcctccagtaggagaatgagatattaataaagtccttgaaccgagtgtgaaggggcttggtatcactagccttgctggctgcttccctacacagaagccagacatgtggtgccagcaccttggagatatagtgggtaaagtctggcacagccctggtcacaaaaaacactttttccctgcgtttctaggatgaggaggtgaatgattagtttacacgagtttccatccattggagtcatgatacagtttccttacaacacacttgctccatgactcatgttctgcattcctgttgtgcagactctcacaagatgcacctcaccgcacataatcatctgttgctttctgcttatccactaaactgttctccctaaagacaagtaccatactttatttgtacatagccaagtgctagtttcatgggagacacagaaggactgaagaaaggaagatgttcattcataaaaagaaaagccacaaggaggtcattgtggagttgttgacttttttatcttcttgatttctaagaatcataacatgggtatttcagtatgacttgccaattaaattacaactgggtggcaataatatattatttaactctcattctgccacacaattaaacaagtatcaacacaacccaatatgcatgctacacagcatctgcacttttctcttgctacaacagaagtagtttccttaaagcaaattagaaaatagtctcatgagaccaaggactttataaagtataaggaccaaggagggccaggtgtgcacctgcagtcccagctactttgggggctaaggtgggaagatcgcttgagcccaggagttggaggctgcagtgagcaatgctggcaccactgcactccagcctgggcaacactgtctctaaaaatagaaaataaaataaaattttccggaccaaagagaagactgttatgatgtgaacagtagcagtcaatatttagaaaagttgtgttcctggtagtctggcacagaatggtgattatgagagatatgggctgtatcacaccgcagcagtggcccagctaccactccaccagtttcaccactttcttgtttctactcaacagtatggttacttacaacacagagatttgccagcccaggtttcatagaaacatagacgttggtcctctgtccccagatattctagttataaggcctatacgggagcctgggattatactttgaaaatgcttttcaggtggcttagatgcagccagtctgtggactctggtttgggaagcactgattagaagcatacaatactgagaagcccagtagttccctcagtctttccactgccatgtgccctctatatgtcttccctgggccatctgtctaaaaatgcctgatgtcttagacagaggctctgaggagccttaagagctccttgcaagacataaaaccaagacgctttttggtatggaagggaaatatcatttagcacatctccatgtccatcatcagttctacttctgaaatattatttaaaaacacatttattgaaatacgattcacttatgaagttcatcctcataaagtatacaatttattgatttttggtatattgacagccatttagtaaattgtacaaccatcaccactatctaattctagaacattttcatcaactaaaaagaatccccaggctcattccctcctacccagaccctggcaatcactaatctactatctctgtggatttgcctattctgaacatttcatctctgaaatatcctaaagtgactgaacgtaagtccagttatatctgcaagtgtctctaaaaatgtttttttctaatattccattgggggttgctggttcttacatcttttatagtcagaaaggcttcacttatctctaacttttacctacattacccttctataacattaactcatattcccttgtcttctctgcctctctctcatcatttcaccaacactcaaattctttataaattcaaacatcattatcaagtcacctcccgacttttctgtaggatgaatgatctgaacagtcctatgccccttcccagatttacccaatatttcctcctatttcttcttatttaaataaccaagtgttcacccttttctctaaggtggatgccttcatttgtgccctcttttttattctctttctcctgttctagaacctggctttggactgcatcttcattttctttcttcaacctacagtaatactccacgttcacactttttaaaaaatacctctatcctgctgcctcctcaagctaccattctctttttctcattctcttcactgccaaaccttttgaaagcacagtttgctctctctgttggtgcttcttttccactcactcccacttcacttcttgcagccatgactctgctcccgttactttacagaaatgtctctccttgtagttcatggcatcaagcccagtacccttccctgaccccattccctgagacctctaggtaacctggagctcagttgactattcctccatcgtgaagcactctttttcctttggcttctctggcactccacattatccggctacttttggctccagtgtttagtgccttcccaaatatgggtgcccactcttttatctgtctattttctccctttccagcctcataacaccatctggctcctaactatgtggataacttccaaaactatcttcaccacttggatgtcctgccagctctttagactcattgctcaaaacagaactcaaaccctgacaggctttccgtctttcctaatgttggccataatgtgacccaaggttgcaaatttgacttttttctttctgtctctatcacctccttggttgccaagatgacaagccatcatgtatataatagcttttttattctattgaagctgtatttcttcatccatcgtctctacttctcaatgtcattgcccaggtccaggctttcattggctctcatttggactatcaccagaccattcgatctctgctcattccatcttctacgttacggccagatagcagtcctccttcaacacatatgtcatatccctaggcagcaatctttcaaattcttctaagcctactgaatacatcctaaacgccttatcctaaattacaaggccttctatattattttccattccttcatattctgtatgttctgtcctaagcaaagcactgatcattctttcacctccacaatttctcatttacaggacctttcttgtcctgtattcttttatctaaaatgatgtcctttatttctgccaacatgattctatgtgttgaaatcctctcatccttcaaattctttctcttccatgaaatcttagaacagtatttctctctcctttgattttccaaaattgtatgaggtggcgggggtgtggagggtaggaaaggacatttagcactttgtcttgtatttccattatttatgtgcttgtcttatccagtcccgccttggattttcattgttataactcctgtgactgctgataaagtatcttaaatatagtatatcctgaataaatgtttcttcagtgaatgaattttttaacttctataaaatatagaagatgtaaaaaactaaacttgtagatgacaggctttatgtcagtgtcaagagagttctcagtagtttccacactattattattttcagtcaatctaggtacaaggctgaggtgaaagaagcttgagagaattgtagcaaacctgccatcatcttcatattgtaatgcctttgcatttgcataatattttataccattataagatactttcacatcttatctgaccctctctatacttattttaggttagaaagagatagttatcctaatatccatttcataatgaggaaagtgtattctgggcagttttaatgacttaattaactaacgtcaggttattgattaggggcagacctggacaaggggacctgttggctgtctttaaatatttgaagaactatcatgtcaaagaaaattaaatctttttttttattctttatttcctcagaggactagaacaaacacaagtgaattcaaactcaatgaggagataaatagtttaactatcagatccacttcaagatgatattggctgcctctgttgttcaagaggagctcagggagagcaagctggccaaccaggtagaggacagtttgttggaaagagcctcccaaaaagtataggttaaccaagctcccttctaattttgcaattttgactttctttttaggtcagcactgtgttactaccctgcataatctaagttttgatttctgtcttttttttagaactcaaccttaagcaaatttagccacagtgtggtccaggtcctagattttttatgagatggccactccaccttatcctacctactccttgcaactgatattggaccacctacaggtgggaatctaaaagaatgtatttccacccaatccttcagtgcctagagctgccagcccaatggggaaaaaaaacacgaagttttcagaaaatctcacaggtgccatcatcacatgtagccggcccaatctggcaactccagaaacctgtctggtattatggccatggtaggcaagcctagtgttctctcagaatgccactctctcattctgttggaaggaggtgggtgactctaatgagctccaaacttttccttgaaatggggagttgcctaaaaaggcaactgcctccaaacagccaaatggaaattatgatatttcactgaactcagaaccaaatctgccttttttttttctttatagaaacattttatgtgccatgtgccttgggagccaaaaagaaatcatactttggctccctgttccactttgctaagctcagatactgtaaataccctcctctcctctcataacgttaaatttttcatgaattcatcataaaggagccactttgtagatttggctggtaccagtgaaagacttcattttctatttcacaggaacttttcagtgcaaaaaaaattacgggtgcaatgttgaaagactagaattattcatcaagtcttcactgcctgcaaatgaagagaatttttctaaagcctatctgggagaatgcagacacagacatgcatattttagatggtgcttcatcttcaccgtagccaccttatctttctcagaagagtcaggagtaagagaggatatgtgctttcttattgttttgtggattcattcaagagttcacaacagctcacacatttcccccttaccttccagtgtacctggaactcaccaatgcaccgaagaagagaatatttccttgaattacgcattgatagaagtaccaatagctttgtatgataaaatgcagtggttctcagactttgacatgcatccgaatcctctggtgggcttattcaaacacatgcaaggcctcatgccaagattttctgattcagtagatgtgggttgaggcccgggaatgtgtctttttagaaaggtgatggtgctaatgctgcctgtacaaggacaacactctgaggaacactaacataatgaaaagaatttagaaatcaggaaaccttggttttagtcctgagtcatctaccaatgatggatctgtggccaagtccctgggcctcaagagtagtgactcctgcactatgtgaactagtgttactttgagaataaaacctgagggtgtgcaaaagaacactcagcactcagggctctagagggacttgaaatgttataattacaggcatgaggagagttgaaggaaaacaaatggaagaagttttaagatgcattcattctgtcaagtccaagcagagaatggccggcactcaactgctatgctaagaaggggccagcgaagatgggaagagttaggtagttcccccattctgtgacctggctctgaaaaagtcagatactctgctttattcatgttctatatgatatagccaggccgtgttagagcagtggtcctcaaactttcctgtgattcagaattaacctgggacattaggtaaatacacaaaggcccaagctctttcctacttcaaggagcctgggccttggggtgattctgatacactccaaagtttgagaatgaccgaatctgtgctgataactgtaaaaccatatcctgataacctgtgaaggaactgaatgccctagacagttttctcagccttgtctgcacattggaatcccctgcagagcttttaaatcccacacgtacaggccaccatccagtcctgttgtatctgaatctctgggggtgaggccctggtatcagtaccttcttacagcgcctcagtaattcacatttgcagccaaggctgagaagcaagcactgatttagaaagagtcccctgtcactgtcctcagcaaatatgttttgtttgtgttttgttggcttgtctctttcccatatcatgtggtgagaatattgaggccatttctttgtgcccagaaaccaacacagtgcctcactctgtgttttagatgctcagaacatgttggttatttgaatgaatatttcaaggtatttgaatgttgaattaatgaatatgcaaataaaatacaacaaaactcaccgcagaagtcccctacattgaactgttttgtgtaagcacaacccgttgtggagttcaggccctcacaataagagagtatttattgaataatttgcagaatcacaatcacggagtatctgttgaataatctgtaaaactgttatcaaccccaactataacttactcttccaggtgagatgaggagtcggggaaacatttgcctggcagagtgttaagaatgctaaaaaataataacaataaaaataaaaaaataaaaagcagcaaattaagacatatttgacacctactacgtggcatacattttcatttgttctcactgaatcttcacagcaaacttgcattctctctgtttttttctgagggaagaaatggcaaaagcaaatcgcctgtgttgggaagcacaggggagtttgttggaccccagagcttgagttcttttccagtatttattttgctgccattcagagcttccctagccacccctgctgcttccctgacctgctcctgcatggctcaccaatggatcctagtcacaccagcccccacagagtgcttcctgacttctccagtgaagtttcccccgggaaattctcactggcccatgatttgattgcctgaccaccttcaaaacgggttagataactcatagtatgctatgctaaccatgttaaaaagcttattctcatagctttgcaatggcttctttgtatgactgttcctcgccctagacagaaggcttcttgagggcaagaatggtttcttgcctatctttatattccctttgcctagtgtacttcctagcccattggagagactcagttttttctaaggaatgaatgacagcagaaactcatccatgatgagcaaggacctcctgaaacatttcagcatgtgtgcatgtgttgtgcttcagaatattttagaaacattttccagatttaattgaggcttctgggaagccttgctgtgttcttccttgcaaaaaatagaaggtcgttaccaggaagtctcagtgtaccatatttatctggtgagttttgaaaatactgagtaatgggactaatgactcaacatagtattttccaaactgtgaggtaatctttggactttgcaagattattatattaagtgtactttttagtctgtcagtaaaaaataaaaagcctgtattttcacattagaattcaaagaacatctgctgcgtattgtaaataacatattttgaaaaccaactgatgcatactcagcctgcctccgcttgctaactatagcaggtccttaagataagattcagtttgccattggtaccgctcttgctttgacattccactgtttggtgaaccaccgttttccagaaatctttagacaccattcaaccctctaaacaaactgagtacagtgaggttttcagcttcctgttttctagtgggattagaaagggaccctattcctagatgatgatgtgtttttcaaggagttaaacttagagaggttttctactggggccatttcttacccccaaggacatgcatcctctggctggaagctcagctcttactgccttgcagagagccaccagttgccacaggcaaccgactgctcccgacaggaagggtagtattgattttgctggtctgcctgtaggggagcgggccaaagaggaatgctcagaggggctcctctgtctggggtgtgcatttgcacagcagccccattcatgtcctccagcctgtatctcacctcctcgggagactgaaaaactcaatcagcttttcccttgttccttctcagtttgtcttgttagcactctttcttagcaagtaagcaccatatgtcttctatgggaacttgttttcaggagattcccagcgcatgtgtgctggctgggaagagaggaattggtgttttactaaccagcagcgcttgccagagtgcccgcttttgagtcctgcccttcctgctcatctgccccatggtctagtttgtcctggacacagtatttcactggatcttactggggtcgcagaaaattgcctggcttgtgagggatttttctgaaccaaagagagagcctgtgtggatgcctctctgtggttcctcattatcctgggtagtctgtgtctcacaagcacctgttcattgatctggtcctctgtccttgcgaagacgatagcacatactgattataggggctctatgtgatgttattgggcttccttgctcttagccagccacccatgccaaagcatgcagctgatatgttctgcttttgaaataatttggtttctgtaacacgaagcccaccacccccctttcaacctttaatacctgtcttctttgaaagccagcttgttgagcatccaatttgtctcttttcttcttcactttcccccagtttccttgcactcaggctgtcttttatcaaaaacagagagtgagccaatgacacctcatggcaagcagcagcatgaagcattttcttctttcaccttgacatcttttcggcaaagaaaaagcaagggttgggaacctgctctattcactttggcttctacagctacctcttttaaaactgctggttgttattgcctggtagctgtctccctgaaggttttaccagttgttttggaaggctggctattttctattcccttgggaattcaccttacacagtcatagatgcatgtgttatgtgtatttgtgttcatatgctatcaattagtaatgaaaaatcaggccaagcctctttggtacttttttttcccctacagatgagtagtcagtgttcataataactgccaaaacttatcttgagtttcctgagtgccatggtctcatgtcattcttacaacaactttttgaagtagtccccattttacagatgagaacactgatgcttgacaggttatgcaccatagtggagctaagacttgaatgcaaagattctgccttgaaagcccaggctattcaaagattaactggattgcctgggcctgatacggtatctctcagtcactcatttgaactttgccaaccatagtcctaaatgcccaatgcttatccttggaaaggctagatatcagcaaacatgagatgagttgaaaataatctttgttctgaagttctaagggataagacgcattgctaccaacatatgtggcctattaaatgatgattctcagtggcacagaggagattgaccactgtggtggggaaggtggggcaaggactgagagagagtgggggacagttctgttatagcccaaggtgataaaggagttgtgataatcactggattgataatcactattctagaaccatagtgttcccctaatcataaaagctactattagccacgtgttgtggctcacgcctgtaatcccaatgctttgggaggccaaagtgagaggatcgcctgcagccaggagtttgagaccaacctggacaatataacaagaccctgtctcttaaaaaatgtaaataaataaataaatgtttaaaagccactagtaagtgaacacatactatatttctggcattgaactatatgctttcatttaatcattctcattaccctataagaagatactgttatctcattttttctctgtaaaatgagatttctctgtaaaatgattcttagtggcatagaggagattgaccactgtggtggggaaggtggggcaaggactgagagagagtgggggacagttctgttatagcctaaggtgacaaaggagttgtgataatcactggattgataatcactattctagaaccatagtgttcccctaatcataaaagctactattagccaggtgttgtggctcacacctgtaatcccaatgctttgggaggacaaggtgagaggatcgcctctcaccaagtttcagagaggttatcctggctcaaacttgccacatcttaagtgaaaaaaaacttagacttgaacccaaatgtgtttgtcttcaaagcctatgctctattctttcctaattatcagcgtctttttgcccattgtgatatttaatcagaatcattatcattaatagctcatccaactgataaaggaaggaaataaatgaattttgtatttgtggaccagagtatgtgattgagctgagtatgcaaagatttggtcccctggtctactggatgatcttttcacaagtgatctcagttagctgccatgtgcttaacataggttgaaagttagttgacagctttgcttcactgaggattgtttccagaattatcagtgcttagtgactttgaagataaacatggattacaggttcaaggagcctacgagagtcagaagagttgggaatgtgttcccaactctttaactagctgtacagatctgggaactgcacttaactctattcaacctcagcttttctatctgaacatcatgttaggtaattccaagatatgttttagctctgaatgataattgctgtttaccgtcaagcctgtttgttttacacatacagaaaaacactcttaacccatgaagtatgtagttaattgagaaagttaaaggaaaaagtcataaagaagaaaatatgctatctacacttaatttttaaaagcagctttattgtggtgtaattgacatatgataagctatgtatatttaaagtgtacaatttaataagttttgatcaaagtacccactcatgacaccatcaccacagtcaagataatgagcatcttcattcattactccacaggtccccatctcctttgtggtcccttcctcctgcccattcacccagcccctgccacatatacaaaaaaacaactgctaagctacctgatataccttctgtcactatggattactattcatgtttagagtattatataactgtaatcttatagcgtgtatacttttttgtgctctcacattctgtataattattttgagatttttttttttttttggaaacaaagtctctttctgtcacccaggctggagtacagtggcacgatctcagctcactgcaacctctacctcccgggttcaagccatccccctgcctcagtcttcagagtagctgggattacaggtgtataccaccacacccggctaatgtttgtatctttagtagagatggggttttgccatgttggccaggctgttctcgaattcctgacttcaagtgatccacccacctcagatgcccaaagtgttgggactacaggtgtgagccactgcacctggcctattttgagattcatctatatggctgcatgcattgaggccatttctttctttcgctgagtagtgtatggatataccataattatttaccttttcacctactgatggacgtctgggttgtttacaatttttggttattacaaataaagctgctgtgaacattcacatacaagtctttgtatggacatatatgtatttgaatcttaaggaagtatctaggagtagaatggctggaactggtaggtatatgtttaatgttttacaaaaatgtcaaactgttttccagagtggttgtaccgtcttacatttccaccaaccgtgtataagagttccacctcctcacatcttcaccaacactttgtatgtcttttcattttagccattcttttattatttttttttttttgagatggaattttgctattgttgcccaagctggagctcaatggcacgatctcggctcactgcaaccttcacctcccaggttcaagcgattcttctgcctcagcctcccgagtagctgggattacagaggtgtgccaccatgtctggctaattttttgtatttttagtagaaacagggtttcaccatgttagccagactggtctcgaactcctgacctcaggtgatccacctgcctcggcctcccaaagtgctgggattacaggcatgagccaccgagcccagcctcattttagccattctaatacacatgcactagtgtctacttgtggttttaatttttgtttttctaatgactactgatattgagcatattttcatgtgtttgttttccatatgtatatctttttgggtaaactttctatataaatcttttgcccatttttaacttaaattctttgttttcttattgtgagtttgagattatatatgaaaaaatattgtttaagaaataatctaaaataaaaataaatatattcttttatttatttacatatgtatacaactccttacatgtatgtacacacacacacacacacacacattctgcaaagatttgctcctagtttgtgggttcttttcatttacttaacagtatctttcaaggagtagaaatttttaattttgatgaagcccaattaattaatttattcttttatgtgttgtgtttttggtattatagttttgcctaactcaaggttaaaagattttctcctatgttttcttatagaagttgcacaattttagtgtttaaatttcagtctccaatttctgagttcatttttgtatatgatgtgagttcatttttgtatatgatgtgacttcaattttgtatatggtatgaggtatagattcaagtttgtttgtttgtttgcttatggatattaaagtgttcccgcactgcttattgaaaaggttatgcattctctactgcattgcctttgcacttttgttcaaattctgttgttcacatgtatgtgtttatttcctcaccctttactcagttccactgatgtaattttctgtctttatgccaataccacatcatttggttactacagctttatgatatgcttgaaatcagggaatgttagccttccaacttcttttccaaattgttttggttattgtaggtttatatatttccatatgaattttagaatcagcttgtcaacttgtatggaatctatagctcactctgaggagaattaataccttattgagtcaaaccatgaacaaagtattttttcatttatttagatcttctttcatttctcttagcaatattttgtattttttaatgcacaggtctttcacatattttttgtgtgatccctagttttttatattttttgatgttattgtaaatgataacatttttaaaatttaaatttttgattgttgctagtacagtttatttttgtatattgatgttatattaaattatgataaatgcacatactattatagttctagtagcttttttatagattctctttgatctttctacatagatagttattatgcctgcaaataaagacagtttaactcttccttttcaatctggattactatctcttttccttgttgattcacttttagaacctccaaaacaatatttaatagaggtgagagtggatatttctgttcttagggcaaaagcattcagttgttcaccataagtatgatgtttcctttgggattttcatatatagccattttccgtttgaaaaagttcttttctaatcctggttttctgattttatcaggaatgaatgtttgatttttgtgtgtgttttttgatgctttttctgcaactatgaagaaaatcatatggtctttcttttttttttttttttttctttttgagacagggtcttgctctgccacccaggctggaatgcagtggtgcgatcatagctcactgcctccttgaactcctgggctcaagtgattctcctacctcagcctctcaaatagttgggaccacaggcatgcaccactatgcctggctgatttttttttctttttttgtaggaacaggttctccctaggttgcccaggctggtctcaaacccctggattcaagcgatcctcctaccttagcttctcaaagtgctgggattataggcatgagccaccacacccagccaggtcttccttttttagtgtgtgactatggtgaattatattcatagatttccaatattacgccattctatgtacattgtacatacattgctaaggtctttttttttgcttatgggtttgctttttagagctctgtatcatctttcttatataaattctcatccataatgcattctctacattctcagtttcagtttaagtggaggcagatcttggacacttgtcaagttttcaagtcctctaggtttaagatttgttttgttttgccagtcttttataatttccttgtccacacctaagtggatagcagtttatctttaagtttctcacctttagtgagtgtctaaaacactcttgtttggtttgagagaagcaacaattatatgtccatattcatagttcagcaatgaaggtaattattaattaaacgatataattgtaatacccagcacaactgggtaaaaaaataaaataaaataaaataaaataaaaataaataaaaacttgggatggattacagctgagtgttggtaagcatacagcccagtggaggagagcagaagtgtgtagactagagaatagccaactagactcagatttagtgtgcggtggtaagctattcagagagtggaaacaattagttactccagggaattacagaaatggaaactaatagagcttctgtaattctctttcattcctataaacagtattcccttccttcagcaaccagtgggcaaaggtccagaggtcaccttctatacgaggaacacaaactagtcagcactgaattatcctcacaattagaaaaacacctgtgaccaagtgtggatccttgcaatgggctttaactatacctgtagcaaatatatggaagaaccctggatttagagtcaagtgagcctgggtttgaatagcaatgactgtctctgtgttgttgagcagccttgggaaaattagtacctcagagggtcatctcaaggaataagtgatagaacatgtatgagacagacacagagttgtaggtatgccttgtgtgtggtttggatccttgttgcaagatgtttacactatctagagtggtgtgttctacccaaccatatgatcctcctgcccaaaaagttccctagctctagcctgtcgcaacatttgatgcaaatggagaaggaaggacattgaaggcagagaaaacagtttgaccgaggttaggtggcaaggaaggagaaagcatacatgggaagatgtgagcagtcaggattgggcacaaggttcatgctgaggtaggggggcagacaagctgaaaagtcgcctgatgtgcgaccatgccaagccgtgaagattggctggattctctcacctctcccctcacaccttatataggaggttggtaagcaaggagagtcactgaaacttttctttttaagggaacgccatggtgagagctgtgccagggattctcaaaccttgactgtatcagaatcacctgggagcttgttaaaaaatacatataccttgggccccacccagacttactcaatcctaatctataggtttgggtcaaggcatctgtatttttaacaagctccctaggcaattctaatgcacgccaaagttgagaaaccactgctttagaaggttaatctggcagcagcgtacaagatggattggagctgagagagcctggaggttcagagacctgcttgcaacaacaatcccggcaggagataatgaggttaggggctgtgggaatggaaaggaagaatcagatatgggaggtatttttgagaggcagtcagcaaggactgggcaacgaatttgatggggaatgtgagggagaaatgggacttaacaaataatgtcaaggtttagagaagctgctctccatggcatgaagggagaggtaacagaatcccctggggaccttagtcaaattgcacacacctgctcccctttctgtgctcatcctccacatcttcctccttccctgcaagttccctgagatgtgtgccaggatggggcatatcagctcctcctggggaagcctgcatgtgtagtttgagggggaaacttttccaggtgacacttctgttgcaagccacttgttaggcatctttgagcctgtgagaatagtggtgtggtgagattaggaggaaggagggaccaagctggagctgaccacaggacatgaaataacctttggaggctgtggaaatgtgagttcagagctgtggagcaagaagtgggctgtgatataaattcaaaaggccactgcatggaggtcatggtgaagacagatgagaccgtggagagtagagaggaaaggatccagaatgaagcttgaagaaggcctacggttaggagtcatatgcagatgaagggtcaaagaagagcaggctgcagaggtgggaggagactgcttctgcttcaaggccaaggcatgaggcagacatctagaaagatctgcaaacaggagggcagaactctagctcctctgccatccttccaccagcgtgattttgtgcaggaagcagtccagtcccccaggagtatgtggcacagtcatgtaaaggggttaacgctgtataggaccacacatttgaaaattttctttacaaaatccagtgtcttttgagctgatgtaccagagactgacaggctgtaacttcttacactattccccccaggtttctgatcaactcataaccttctatacacatttttggcccagcacagccaaatgtaaggtattaaaaatcattatagtgctttggggtccttgctccccgcaaagttccagacatgctgcctgtattttgtgatgtcacactgtgaaaataggatgttgtgttttggaggcacctccagggtgcccagcaattggcacatcttaagtgaaagaaaacaaattgagtgagcaacagtagaaaagaaggacatttgtatcaacccaggaaataaagaattacgcagagatgctatttatgctgctatgaagctgtgacttgatagggacagcataaaggttgcccactcctgacattggcaagacttcaggctgaccagagccactccactgaagtggggtcagctgtctcagaaggtgctctgtgaagctgacgcagaatcacagtttgctgtaaaaagggcttacacatgtaaaaccttgtattttgtcttagaagtatcctggaagctatcgcattttcttagtagagacacagaggcatcaagtaataaagaaacgattccaaggttccagactcctgggtagttgggcaggagactcaacctagagttctggtttgtagggtacagagagaaaggcttgcatgcgggaagagcacatttaagaatcacttggggatgggcgtgggttagattccagtctgttgcttcttaactgtgtgacctggggccattcatttgacctttctgagcttcagtctccaattgtaaagggcagaaaatcatatttacctcctgagagtagtttcaagaattaaggatgaaggcaccattacagcgcttggcatgaagttgatccccccaaatcgatgcccatcatcataattactgggtttttccccagtcgtctgaacactcatgtactcccctggatgcacgcaaagagacactgctgttttcctttggcatccctagtttggattttaaatgcttttttcctcattaaaataatgttatagctggaaggagcttaggtgcagttgaaataatactgttacgaaggtctgtccttcaaggcatttataaactgaatgggactttttgagtgggcctggacaccaggattttacgggaaaggtaccctagcccccttttttacaagtgaacttttattaagccaccagctctcagaacttgcagaattgctggaaaattgccttgggcagggtatgtaatcacaaaatgaataaaagacaacaggatgtgagtctttccaaagcatgggaatagcacactgcaacttcttgccatccctaccctgggcaaagatgcagctaaccagctacattgatacttggaattaagtcaggaggcttggccaggggcccccaccattccacaccttgggcctgactgccactctcagtacaggttgctaatttaaatgccatctcctggcactgcatgttgaaacaaactggaaaatagcagggcctttccttcatcagatcatcaatgtctgcctggcgtctgcctgcctactgtggccaacaacctgccttcctgtgagcatcctccaatgtacaaatacctcaaggactcctgacctctgggatttcatggctcctgtccattcttctctcattctcttagcaaaagaaattacttaagaatgggtgagggatggagacatctctcagctccctatggggtcttctttcctgaacaaactgagcagagccgcaaaagaatacataaggaaggcttggcagaatgttttgatacaaaattcattacaggtttgtttatgtgctgggcagtttgggtcctcttacacgtgtgtagacactgcattccttctggttcaagttttgtgtttagagagaggttttggaaggagatcaaagatgtcagattgctggcctaattcttaaaagaactgatttggggaaaggcttgaaaacattcatacccaggtttgaaaacaagaagtagcaatgagtccagaaagcttggtgacatggataacagtatatttttaagaaaaagagaatttgaatgtcttctgcacaccttatccgtccctaatctccatatcttccatatgtatttttcttgttttataacactgtctaagactcgagtgtaaaatccatcatccatcacccaaccctcacttttgagtgggcagagggtgttgtggaggtgactggaattcattggggtcatatctaagcatgagttaagagatctatctgggactttgtcttctttcatgttttttcttccttctttacagtacaccgtcaatagagattgctggcttgtcatccagtttcctaaatttcctgacttctgccttgtctggcctttattcctgtctatatctctctggcttcaaggtgataaaaatgctcacattttcttaggaaatattcagttgtattctctttgttgtgaaggctcctttgtccactccgtctcctccatttaggggaggttttcagggataattagtgaactcagagggatatgatgtaccttttcaaatcagggtctacttccagtttttcaggtttgttttaaagtgtgtggctcaggcatagagagcagcggttatttggacacctggagttacttggctttgctacccactaccttttaatgtgaagatacctcattgcattgctctgcatatgtgcagaggaaatttggggggaccctgttcacctttggcatatcttgatagttgtatgtgcctgcttgttgttgttgtatattgctacagcaatatggctcatcatctttctacctaagaagatacaggggaaaagaaaacactgccataatcaaaactacagaaatgggtttcataagcattttctctaactactgcgtctacccagatccaataggaatgggagggcattggcatcgttagaaaccggggcaaaagttcctgctgcaatataaaatctatagattacgcttggaatcagtggaaaccattgccctttatgccagctgcttcctgaaggagccaagaaaagtgtatagttcaggggaaatgcaaatataagctccctcctacctatagcaggaaattagaaacctctttggttagcacaaacagattatgatttttttgcaagagagaacaggagagaggaaagatacttgaggtggcattgtataccataaagctatatttatgtgctaagacaagcaattgatgttgttctataaaatatagtaaacacctcctccctgcccttttgaatgtcagtcagaattcagaatcatgaaattttatagtattactggttagaagggcttcccactgggagcagatgccatctctgtcttcatagactcagagaaagtcctgacatgtttcatggcgttcgtacgtggaagtctgtgaaatggaaaggaaaacagctttttctgtcaacctgtcactgatacaagcttttacattccatcagaatgactaaactttaaagctgttttcttcagtgctgagtatctctcagaactcccaagtgttatcagattgatagagtcccagcatatgatagaagaccaaagcattttgtggcatgatattaaaaattcattcaaatactcgataaagcgtggttgacaaaagtgtgaaatggaataaggtagagtgaatttcttcatggtttattgcccttgatttctctccacaaaataaatagacagaatggactaaaatctcttctttatgaaggtgggatcctggcagctgaaggcctgctcataaaaatcctctccgtgccacatacccttgcaatgttcaaagttggaagcaatggaaatttattgctgttatatgtattcatgtttcagactgagtgaataggtaggggatgcttttatgaggttgctgagaccctgtgaagaatagagaaataaaacacacttgtttttcccttgaagcttgtttttttctaggggggattggtgattttagtaattatagtggtattggcaattcatggtggtggtggcggcctggtggcagtcctccccctgaaggtatttaaaagaaaacactcttttcacggtctccccttcctgcctgccatcttgttttgaaagagaagcataaaatagcaaatctttaaagccactgcaagccaagcctgtgttttcatctgtctccctcccttgccaggcctccctctgcctttctgacctgccacccccttccttccttctgtccctccctcctctcagaggacatggggagtgagaggcttccccctgtttccctgcaatggtgggacagaatgcctcattggtttcagatattaacttctgtgctgaaaacccggttggagctggtgtgacaaatggattgtacctgctgctggaaaacacagccctgtcccacccgcctgcacacacaagccctcttccccatcttgcagagcccaacctagggagcagggaacagagagctgccccgcggcaccatctgtttctgccagcatctatgttgggccccgccggttacatctgttgagaagaacagtgtacttgatgagttgttggaaagaaatgtttagtctcccccatcatctctgttagccattacgaggctgctgggctcacgtgggtgtatctatgtgtgcttcctctcaggcctcatctgtatcaattggaaatcagtcactgggagttagttgcagtcagcagggacccaaggcatttcccagtgacatcaattcgtcttctcttgcagaaattcaggaaacaattaaaattctgatgcgttccagggaggatttcaaataaatcagccgatagctgatatcttgtaactcttggtagcaaagcaaaattaacaacccagccgcatctgtgtacagtatgctaaaataaagaaattaaccatgcatcacctccaatagaggaagcagctggcctgttctcaaccttcccataagtacccaaaacctactgatttgttaagttgtcattctccttatggacatcaaggacttcctgcatatgccaaaaactgagctggccaaataatcggtaagttgcggaaaatccaggcaccgattaagctcagttataactcccatgttatgcagaggaaagctgacattttgaggcggacccagttgatagctgctgaggaggtaatacaggatgcaagtaggtttggcagcaggtttagccagaattttgtcagaatttgaagattttggaatcataatcagatagccagtattttctctctcccctcaaaccaaatgcattgtgcaagaacttgtgttaattatccctgttaattacagtgataccacctcagcttttccaggctcttttttgcagctgtctttgtggtgatttcttgtcttaccacttgctgaccaatggaactcaccattcttgctaggttctcttaaaaagcagcataacaagaaccggtcgggagtatgttcccttgaaaaataaaaatctcagcatcacacccaagtaaaagccatgtgccttattgaagttctaagtctatagtgtgtttgtgtacatgcccgtcacataaagtgattgtttattagtttcagtggatttttttcctagaaagatgcataaaattttaaagtaaaaagaatatagtgagccaggtggggtggcccacacctgtaatcccagcactttgggaggctaaggtaggaggattgcttgagcccaggagttcaagaccgacctgggcaacaaaatgagacctcgtctctacagaaaagtcaaaaaatgggccgggcgtgatggctcatgcctgtaatcctagcactttgggaggccaaggcgggcggatcatggggtcaggagatcgagaccatcctggctaacacggtgaaaccccgtctctactaaaaatacaaaaaattagccaggcgtggtggcaggcgcctgtagtcccagctactcgggaggctgagataggagaatggcgtgaacccgggcggcagagcttgcagtgggccgagatcgcgccactgcactccagcctgggcgacagagcgagactccatctcaaaaaaaaaaaaaaaaaagtcagaaaatgagatgggaggatcgcttgagcccagggtgttgaggctacagtgaattgtaatcgcaccactgcactcccacctgggtgacagagcgagaccctgtggaaaaaaaaaaaaaagaatacagtggctggaaaacaaaacatcacttgaaaattttcccaccttttaaattcccagcactgggaaggaaggggtctggtatggtagtgatcgtagggtcagctcaggaaatggttcatagggtgagctcagtgagaatcacattaggatgagaggaaactcttaagcagaaccacagtggggacattcaagagtggtggagaatgaatgccattcctctgcctgtaagagggcacattatgagaaaggtcaaagaagtaaggaatggaggaagatagggaggtctaatcagggcagagagaacaggaaagggtccacttaaccccttaaaaacagcaactgttgtcacccatctagtgcttacagcacctggtgcattctgggtgctcagcatacaatccctgataatcatcacacttttgccgacaaagtacagccataaattacttcccccaccacctccccagtcagcagggagctgcttgctacaaatgagtgaaaatattcaggtactcttacacctagagatcatggagagaagtagttaggagctgtgtactattgagataggaagctcttccacacaccttgctgtgggcttcctttgcacgctgcactggttacatcagacatgctttgtgctctgcagccttcctatttaaacatttgccctcaaaaacttcacgacaagcatatgaattagcagtttttccaacctaaagagaattatctactgtctctagatgattctcaaaatatgctgatagcaatttgaagcattataaatctatccaggttggttctgaccatgttgtagaagtaatttcaactggcacgtcacatgaaggaacagatttgaaaacagtggtatgcatgcccctgaaggtttcatcttggctaatggtctcaccaccttatggcactactttggattgtgacaacggtaccaaagaaaatgtctatagtctggaaaagatttatcactaagtatgactgtctatcactctggatgtacccccttgttataaatctccagcaagactgatcacttggtatacgtaagcatgtaggtacatgcatgtacaagtcaggagtgtgctgtgtacttgtctagtatcacttggtgtattagtatatatatatatatgtgtgtgtgtgtatttatgtatgtataataactcatagcaaatgtgtggacatagatgagaatataggttattagtttggagaaagacttaccagtttgtggacattgtatatacagaaattctcaagatttctcacatgatgtgtgtgcatgtgggcttgtacatgtgtgtaggtgtgcattccgacagtgtcttccatgagcgatgtagggtattattgacttgaggaagcaatcactgcttacatgaggaggcgtgtcatcttgaccagcatttaatgggaggggaaagcctaactccgtaaaaacgcaactgttaaatcttaactgccttagcctttcattctgagctgagacgttatactaaaatttctaaagcagagacattgttatttttcacgtattatgctaataaaaatagtgactggtgtgacttagtgattggagaaaaggggcttaggactgtaaatattggtagactttcctttcggtacacctttataagttatccatttaatcttaaaggaaattcaaatgccaattcaactgggaaatcaaactctgatgcaggcaactcagggacctgttctctgacccacgcacttgaacagtgttcacagtgagaacagttgagtgcatttagaagctagatccacttcaagaagttagcagtaggaagcatttcttttcctgttggctgggatgtagaggggtgttagaactttttccctctacttttgcaagtatgttttagggaactttataattagcttttgtgcatattttaattatttttgcccatcatcaggtgggattaattttgactgagagcaacagtgtagtggttggtttgtctcatgtaaaaggaaggctgggcctaggctgcagctcagtgatgctactaggaactgaagcacttcctattactgctctacctcttccccatgtagaatgcagtcattacttatgttgcctcacagtcataagttgaacttcagatttcatatcttaaatctggaaagtacaaaaggctctgtcttaggagggtttgtcttttatttatttatttatttatttatttatttatttatttatttatttcaaacagagtctctatcgcccaggctggagtgcagcagtgcaatcacggctcactgcacccttgatcttctgggcttgattgagcctcccacatctgcctccagagtagctgaaactataggcatgcaccaccacacccggctaatttttgtatgctttgtagagacgggtttcgccatgtctctcaggctggtctgaaactcaggctcaagtgatccgccctcctcagcctccaaaagtgccaggattacaagcgtgagccactgcgcctggctgggtttacctttttattcaggtaaggacagtctcttctgggatttgtagcaatcattggccagaactatatcaaatagtcatcccctacatatgaaggaactaaggaaataaattattattattattattgttattattattattattattattatgtttgagatggagtttcactcttgtcacccaggctggagtgcagtggtgcgatcttggctcactgcaacctctgcctcccaggttcaagtgattttcctgcctcagcctcccaagtagctgggattataggcacccaccaccatgcctggctaattttttgtatttttagtagaaatggggtttcaccatgttgggcaggctggtctcgaactcctgacctcaggtgatccgcccgccttggcctcccagagtgctgggattacaggcacgagccaccgcacccagccagaaatcaattatttttaattaaacatatcactgccctgaaaaaaaaatgggattctccttaaaaaggaagaagggagacgtgtacctgtaaaagagcactgctggatgatatattcccctggcctctgaaaatgcacagtggtcaggccaaccggctcatttctattgcatgatatgcacaaatcaccattgaacttcaaaaaaatcctaaaagagcaagtctcaagacaggtaaatccacagccacaattactactaaatgagaacttttagtttggaaacaagcacctagagaatgccaaaaagtcaatgttcctgcagatactagaagggcacagcataggtaaacacactttatcaagtactgtgatactgggatgttgaagcttgcctggtcacatttaaaaaaaaaagtgtcattttaatcagaaaagttttaacataacatacagtcaacttataaaattcattacaccaaaaataatatagatactacatataattagagtcagatattttcacagtgttaatggatgattccaatcctcagtcaacagacagttattgggaacctactatgtgctcacagaccataggggaatatagactatctgaacagataactatgacaacatggcaggtactaaactgggatatgaacgaggtggttttgggaaacaggacaaaacagccaacgctgccaaggattgttgatgaaggagtttaaactctttccttttttttttccttttttcttttttttttttttttgagacagtcttgctctgtgagcgatctcagctcactgcacctccacctcgtgggttcaagcaattcttctgccttagcctcccaagtagctggtatcacaggcacccactaccatgcccagctaatttttgtactttcagtggagttgaggtttcaccatggtggccagactggtcttgaactcctgacctcaagtgatccacctgcctcggcctcccaaagtgctgggattacaggtgtgagccaccatgccccgccaaactctttcctttggtgtttatatcctagaagataaatttggccttcaacaaactatcccttgataaccttaccagaatacctgggagcagaccagggtagaagttcttatatagtcttatgttcttatttttagcttccaggaaattcaagtttgggaaagtaaagaatgcctggattgatactaagagaataagtgaactccaggtctcaaaattttgctaagtaaatccttgtcaaggatcttcgtagagcaaggaatctaagatgatttatgcatctgtagaataacaccataatgaagctgttaacctagccaaaagctttggtggacatgacaccttaaaggtggccattataaagtgagagcctctgacagctttttcatggttttagataagtgggtgtttgaaatcattctggcagctcaccaaatgtttctttgcatcttgactactggatgaatcttgactacaagtacagattttatgtatacttattaaaataatataatttggctgggcgcagtggatcacacttgtaatcccagcactttgggaggctgaggtgggtggatcatggggtcaggagttcaagaccagcctgaacaacatggtgaaaccctatctctactagaaatacaaaaattagctggccatgctggcgtgcgcctgtaatcccagctattcgggaggctgaggcgggagaatcgcttgaacccgggggtcagaggtcgcaggagccgagattgcaccactgcactgcagtctgggcgacagagtgagactccatcccaaaaaattaaaaaataataaataataatataatgtatgtcccagccaccccatgccctgtctggcactactgccagcactggggaactgggaggagagctgaggaacagctccccttgtaggctcctttgtcttcattgattgacatatccaaggagtcctgttcccagcagtggttccaatatgagcaaaagcaaatctttgctcatcttcaaatagccttgtgtatttaagtaaccagaatgttccacatttctgaaatgactatctcacctatctagaatataagttattctaggcaggtggcacctgtgtcttattcctctatcctaaaacagaggagggattcagtaaatgattgctgaaggggtctacattagagccaaaggtggtctgagcaatccagcctgttttagggacctgggtgaaaagtcctggggagtcagaagctctgtgaaaacaagtagagggaaacagaaaagacaacaaaggggtgacaatgtttcctactttccatttgacaaagaacctgggtgtattgtagttaatatccctggggggttatcctgagagatgacatagaagcttgttgtttttggtataaacccgcaatgtcttcttatcttcattcccctttctcattcctccttagagttacctaagcacaatttcttttcttgttttgttttgttttgttttgtttttttgagacagggtctcactttgtcacccaggctggagggcagtggcgtgatctcagtttactgcagcctctacctcctgagctcaagcaatcctcctactcagcctcaagtagctgggactacaggtatataccaccatgcccagctaatttttgtgttttttgtagagacgggatttcaccatgttgcccaggctggtcttgaactcctaggctcaagcaatatgcccgcctcggcctcccaaagcgctgggattacaggcatgagccaccatgcctggcctctctttaaacactttttgcttacacactgcttttggaatgaaaagaacaaggagacttcagtcatatcctcctggatttgaatgctaaggagctgcgtaacatttctgaaatcttcccatgtttattaataagagaataattctacctaccttgtagggttaaaggttgagtacgatagcatggaagaatttgcccagcacctagtaggctgtcagcgcctgttacctttcctttccccaatgctccctaaagctaagttcattggcccatcatgtagagtaatgggtccacaggcggtgaattacttgtgatgctcttccaaggactgaatgaggagagacattttaatcaaagcaccagcaaagcttttgtagcgatgaacatacaattagtgaccttctcctatcagggataatcagcagtgggactggcagaattggaatttttttacatgggtgatctgggcacagatactcagtcagctctgtgtcgcttagaactgggaggcaggaggcatttgcaggttggtcacaaactgggtatcagacatattaagcctgcattcatctgacaggcctccagaacgtgatgtcaggagagacgtttagcagtggggagacaattatgagactctcagaggtgagaaagaggattctgctcactgcctagaaagagagaatatggcattggaaagggggtggtaaaatatgttgcctgacacacaccgaaaaggcctgtcagttactgaggtcccatcgccgtctcaggcttagactgcatgagaggatctatttaggggaaaaaatgtatagcttagccccagtggctgctggggtgaatctccagggctcaaagcacgagttacagtttgtctttagtttacttaataagcttcctggactgtctgatttctttacagcctggaacagagggtaacaagtctcccagtgcagtggatccaaagttggtgggcttcagtttgggagcaaagagctcactgtttgggactgggttgatgtcatcattttatgacagcatattaacacagagtaaatagtttattccccagggtactcacccattccctcagaggtgagtgtcaactccttcgagagaggtctgctcacctaacctgccaattctcaaagagccccacctcaggcattctcatagcctttctctggccttcgtaggtctttgtcccattccccgatgataatgccttcatgacaaagatgaaatgaaggttgggggcagcctaggctgtagtcctggtgctgcaccactagccgtagagccttggccaagtcatgcccctctctgattttttcattatgtcaactggaaaatatagtcagactgcctgccctgcttgcctaacagcacagtctgaagcatgagctgatggaatacatgtgtaagcatattgcatagtttgaggaagtattcatgtatacagtggtgatattagacttaagattttcattttttcatgaaattgaaactagaccatctgaagtcattgaaataggaaaaacacatacagtattttaaattagttctactcatgcagacaaaaaaaaagtgtcctggtacatcgttgtttaagatctggtgatctgtagtgtttgtctaccaagtggctaccgtaagtggcctccacttgataagttgtaacaagatcacagcaaccccaacatctctgccactttctctttctctcttctgttttgggtggagagacatctatattgtggctgtctcagagttacggggagagcaagtcaacggtaacagggaaaaacaagccttgtgtgggttggaccagaccatttgtaaggctcttggggcatttgtgtgcacgcacacacagacgttaaccagtccagaaatgagtgtcattctcctcacacagcgccgacagctgagttcttccctgatatttgcagacctctctgaagcttgactttgaaatcctcttttccttgaaccctacgtgtgagagagaagcccttctttgccactcaagagtggttctgtggtaacagtggctctgtggatcttttgtccctggctggctccttcatatgttattgtaaggttttagtttgtgctggcatgcaggtgtgtttttttctcactcagattttctcttagatgctgtaatacaatctataatttttggtacaggagcaagtttttacaaaggaagatatgtgcaatttgtcattttccagcctgatgacatataattaaaccttcaatagtctatgccttcaatagcataactacaacaacccatcacactttggaaataaatttgtttcatattttatattatctggactctctttgtccagtgtgtaacaggcccccaggaaacaggaagtcccccactagtgagcacccctaatgtgaatgactgcacactcagcctattttggtgagaacaggcagcttgctttcggtgggctcttttgaatgggccttgcccaagctcaatgctctctctctcctcttggcttgtggcacctggccacagtagcaggcattgcctgcttgaaaagaggctgtccttggattttcctgcctcttggaacacagagcttaattcagttccctaactccgggaagaagcaatgatcttcagccctatgaacctgtccggcaacccacagcggcccacaaaatatgttctctcgcctacaacctcatcccagctgctaccacagccctgccgacgcagcgcctgctgcggtcacggtccactcccaagggacactgccttatgtcagcaggccctgtcttgattcccaggtgctgggaagacatgattgcagcctcctgcacccctgctcccctcctctgacacacacactctgagcctgcaaggtacagcagcccactaaagctctagttaaaagtaccaagttgctggaatgcccagggaagtgagaatgagcgggtctcacacagggatgatttgaaacaagccttgtggctttttaataatgtgccaaagcggtctcagtggtgggccagcagggcccccagtctatcttctgtgaaaggagaaagcccagcaggccctgccgaatgcagacagcccctccactctgctggaggagacagactccgagatggcaatcaaggcttgatttgccaacacatttccaatgattaaaatgtaattagcacaactgagtgcctcctccccagctaattttaatacatgctgtgacaggcaggcagccggctgtgcctttagcccagcagcagatggaggcagaggcagcgggagaggaaaaccattttgcaatgtgactattcgcatcacaaaaccatcagggcgctcagctcttagaaggcccttgatggcagcacatcaaattggcgctgtcatagctgaccgtggcaatggcagtcatccttcatactgtcccagaagcacagcgaggcaatttccaggcgtaaccctttaagatctagaaggggagagagagacttggagagcacacttgtcgtcttgcagtgacaggcgagagctttgcaatgtgcgctgtgaaacccacgctcttggcagcttgcaaaccgttacttacatgttccttttccaaggcacagtggagtgtggttcagaagctttggaaatagctgtttctccaaatgggagacaggcgtgagctgccttctgtgtgcattatctgaactgggaaggatgagcttttcagcctgagatggtatggcaggttggaggtttcctcttctattccattcatcccatagaagcctttgagcctggggcctctcatcatgaccatctgcttttctcctatcctgaagggcatgtcagacaagctgcaaagtccagaagaccgtttgcctatgctcctgttctctcacctcctggcagaaacactgggccctcaccactgttgtttggcctgccctctccttccaaggcaccacctgaaaaggaggcaagctccttggaggctaaggatcatttggacctccctgggattggggtgcacaggataatcacagggggcacttgtgatctttgggatctgtcacccaggcttggtggctaactttctgtgtgtgtgtgtgtgtgtgtgtgtgtgtgtgtgtgtctgtgtgtgtagacggggtcttaccatgttgccccagctgatcttgaactccagggcttaagggatcctcccacctcggcctctcaaagtgctgggattacaggcatgagccactatgcatggcctggtggctgactgtcatagaacaccaaagctagacaagcctaaataataacagtgacgatgctaagcatgtattgggcatttaccatggctgagaactatgttaaatctcttaaatgcattaattttctcacttcatacccacacaaacctaggggctccatattattattcccattttacggatgaggaagcaaagtcacagtaaggtgcagccactttcccagcttctgctgttaagtggcagaacccaaatccaaatacgtatctttctaacttgtgagtgggacaaaaaagtcatagctgagacatgctgcaccacagagatgcttcaccagtggaagcctctgagcagagaaatccgatctgaaaacaatgggattattctttgccatctaatggcctctgaagatcagcagccatgggaacctccagaactccatcacacgggtgacgtttacatgccgttgtgcatgtgtatctttttctcctctaaccgaaaaataatatgtaatcgttaaagatcaaaaacgacagtaaatgtaaagatgaaaataaaagtgacccaaactctttatcactcagaaataaacagtgtttggtgcatttttttccagtgttttttttttctttctgtgtgtatgcttagcaattttaaagtaatattgtatatataactctatgtatcttgtttccttcattgtagtagtaataataaaagtagcagtttttaatgtattttctccttactgctaccttgagaggtagttactatcacccccgttttattgattaaaaaaagaaattgaacctgtgggagggtatgtgactcacccaaggtcacttcagttaggttggtgaaaagtaattccagtttttgccattacttttgcaccaacctaatatgattttttttaaacttccctatgactgtgatcacttttccatttcagcaaaattctttatgaactttaatttaatgagtgaacacaaccctggcaccttgacctgttccccaatttggtaacatttaggtttatgaagtctgtgtactaggttagtgcagagagttagaaacaccaggattcaaatgcctggatcttcctcttatagatttatgactcttgacaagttgcttcatgtctttaagactccttctttcactgtaaaattggaaaactaaaacctacacactgggggctggggggtggggggagtttgctgtaaggttaaaaacgtgaatatatgaagagtctatcttagcagatttcgtggcccttgctatgtgctgacagtagccatataaataatgtattattgggtcatttcctaattccataatgaaatttttaaacaaattattatagacatttttgttcctttttgagactagttgagctagacagtatggaaaatatgaaggctcttgatgcatgcttctcttcttctgatgcaaattgcaaaattattttccaaatagaaattgacattcctccagaagtatatgagtgtctgcctcacgacagccttgccaacactgcatatcagcatttacatgtttttttctaatttgattgatgaagagaaatatatctctttttaatctgcatttctttgattactagtgaggtggaacatttttttcgtatgtttattagccatttatatttcctcttccgtgaattgacctctttgcttttgaaaggaaggatgagtctccaagggctagctagagaaaagatgctccagtgataattatctcagagccctggggtgaggagttgcaggggagagaattaaaggtctcctggggctatgaggcggctactaagtgagcggctttctacaccagagcgaggctttctacacagtcagcttgaaatcagtatttgttctctacctttgtatttgttctgttaagaaatattttggattttttagtgggactcttcacattctactcaagccagcgcttataattctttcagggcagacaacgagcatgcctgttcagtttgggttttttgctctgaaagtcccattggtttacagtgaagttgctgtaggtcttgcttgagtcttttatgatccctgccatccagccaggagctgtgactgctctgtaaccttcttagatttaaatctgttgcttgtgttctcctcatagtgttacagagcagcagaggccatccatactgatgtcttaatatcattctctccttagatttatagggtaaaataaaccctctgccatagaagtgcttattgattactgaagtacataataaagcctaagaataaagtaagaccaagtaatcggttctgttcctgggggatgacaataaactctggccgaggcagcctctgaaggttgccttttgccttggagctaggaggctcctttttaattggttgtcaaaatagtaagcagtgactgatagaaatcagacaaaaagagtacatactgtatggttccatttatgtaaaatttttaaaaatacctactaatctgtagtgacagaaggcacatcagtgatacggtaagggacctgagagagggatagaagctttggggagggatggacaggttcactgtcttgatcgtggtgatggcttcacaggtgtgtacacatatatgaaaagctatcaaattgtgcatttcaaatacgtgccttttaccaatgtcagttatatctcaataaagccacaaaaaaatagtgaacagtatcccataaagagacaatccatggctcactctgtgctagaaaaattttctcttttcttagaaagctatattttgacaaacattcagggggaattgtgagactacatttcaccttcacctttagctaaataggggttttagaagactgaaagatgccaccggaaattaaaaaagaaaaaggcataagaaggtaggatagccctctttcttcattcctttttctttcctacatctgaaccttaaaggtgccttttaacataattttttagtaaaacaaaaaaaggtatttagaaaatattaattcttttctctcatcccccccaacccttctgctattacatttcccccacccagaaaagagattctacagtgcagagtaaaaactactccaaaatgttggcagtctaaaagtggacaggcattttcaacacaaagagatgtttgttttccttgcattttaactcttaatttttgacacagtagggaactccagcatggctgccatttaaaatgtaacaatgccatgcagctctgattgcctctgtcacaggggtgttgtgactgaaggccaggagacaaagcaaatgaggccagagacagtgcctgctgctgaagtgctggtccatttctccacccgcatttgaatttgtcttttctctggctaactgcttttctgccctgatgaggagtcactcggggagactgaagctggaatttgtacaacctctttcagtccccttgattttaatcagaaatacacaattattcttttcctccaaatagagaaactcaatccccattttaaattcaattattgtaattgcagcattcagaaaaatagcacattcattttctaataagagattgtggataccaaattactgcatatagtatgtcaaaacaggaaacttgagactggcaaaccagtgggtgtttttatcttggcaatttgtattttcttgcagacaatttatagtaatcctacccttccttgtttatgatatagaagactaggttttaaagccatcctaaaataaagactgtttttgttgggtacagtttaattgaaaatctgttatgagtatgaggaattctacaaagggcaaaagtgaaggcagatacccaataaagggaagaaaaaaaaggaatcactttaggatcctatgtgacggtagcctaagatgtctttggatcttcttgaaccattctcattatctcaagccatatttatattcctttagccaagtttctcactatcttgcatttgtaaaaaaacaaaaaaagaaatctggttggtgagaagttgataatgtggccattatgtcttagcaatatgagagcaccattgtccctcttcctgctcaattccagttgctctagttggcttgaagtgaatcaaatgtgaaaagaaatacagtttttttattttgagtttcctgattttcataaaagagtaaccttaagatgtgatttcttcaagtgcatgctgttattttcttaggatttactgtcacctcaaaattatatccatgtcagccaggcatagtggctcatgcctgtaatcccagcactttgggaggctgaggtgggtggatcacctgaggtcaggcgtttgagaccagcctggccaacctggtgaaaccctgtctgtactaaaaacacaaaacattagccaggcatggtggcgcatacctatagtcccacttatgggaagctgaggcaggtgaatcgcttgaacccaggaggcggaagttgcagtgagccaagatcgcgccactgtgctccagcctgggcaacagagtgagactctgtctcaagaaaaaaaaaattatacccatctttttcatagacacattcagacacctaccacactttcagatcttttagtgttcatgccgccaaccactgtctctctcttgatctcttcactcagacactctccatgctaccttccctcaggtattttgctactgtaatttattaattctttcacatatatgtattgagcaccttctaggtaccagcttcaagtggagcaagatatgagcaaactctgagatactgtcaaggaaactagccaacagtgttggaggtgctagaaaccaacagttaaggtacagccagtgaagtcagagccctggaaagcttccatatggaagaaggaacagtcatttccatgtgtcctgaaagggtggtggtctgttggatccttgagtgcctactaagtgccaggtactttagttatattctctcagcaaatccccatttttgcagttacctctgggaatttttatctctgtcaagattactctcctggttgattttggtaaatcagtccttaaatcaatcttgaatataaataatctgtgagtagggctatcaaaactatctcctaattctgactggtcagaatcgctagacaaagtttaaaatatgtagcttcctacttgtaccagtaatcacctagtgtttttaatatccattctatttatctgtgtatttatttttccaacttaactttgaacattttaataatgtcaaagcccatatgcactatgcatagcataacttacaaatttaaactccaaatcttgtacctatgcattttactttagtccctgtgtgcaggttactgactatttgaagaataagtccaagctacttccatcccaaaaaaaaatgttcatcaagaacctaaagaaacacttcaaaatttcagctctaaggtgtctttcctttttggttttttatcagtgaaataaaactattagttacctggaagattcttcttgttgctcacttcgttgagagggaatgatggtttctggttttgtttgtctgggtggttgtttctgttttcgtgtagcatagtattgagtctttaaacacgtcctgagcagaaatccttgcagaatgtgacttcccctctggcaataaaacggtacaaaaattcaacccaacatttaaataattagtaagttaccctgttgttgtgtgtgatataacatatctttcatggaaataactggaaaaatgaaactattggtatgtctttctggctgctttcacatacctgaactgatttaattctcacaaaaatccggtggggtgtgtatcatcgccattcactggttaagaaaggtagactccaagaattaagttcctttccaaacacagcatgattattaagtggagggggtcagaatttgaacctacgtcagcctcagactgaatgagcacttcctgtgagccagggactgtgctcagtccctcttaagggagagctgtcttctgtggagcagaaatacggctatatggctgcattcactgctgcttgtaggcgctgcaatctcttttcggtttcagcttgcctctgtactttgccaagcaatcaatcaggaaaatattttgaagtagtttctttgtatagcctgagagagagagtgagatggtacgttatactggctaagaacatgaactttgaaggacataactgggttcaagtgccatctctgtcactggaagccttacttaccttctcatctctaaaatggaagggtggtagtataatactttcttctagagctgttgtcaggattcttggtgttttttgtttgtttgtttgtttctttgtttgtttgttttggacagggtctctctctgtcacccaggctagagcacaatgacatgatcagagctaactgcagccttgaccttccgggctcaagcaatcctctcacatcagcctcccaggtagctgggaccacaggcatgcatgaccatacctgctaattttaaaattttttgcagggacaggggtctcgctatgttgcccaggctggtcttgaacttctgggctcaagagatcatcccgcctcagtcttccaaagttctgggattaaaggcatgaggcattgcacctggcctcaggattcttttttgatgaatgccagccaacagctggcatttctagaggaaaacatgctctgccgttgttcctgtggaggaaccctgcaagatgtgaaatgcacttcaacaaccaggcttttccaaaatagagagctcagggctgccctgccatcatggacaccccatctctcctttagcttgagatggacattgaccctttggctgggaattgaatcatgttggtgatacttagcatggaaagccgtagctacattcagtgtctcacaaccttagtggtggaaggaagaatggttgcagcagcttcattacctggggaaaaagaacttggaattccaagcactttaagaaagatgcttttactttgagtgttggagaaaatagagcaattacctattgaagacaaagtggatgaaaaaacacctctgttcatgctaccctgatcatgtaatctattcatattcattctgccttcctgaaggtgattcaagccagactggctgttcctgctggctgtgcctttccttccccaggatacacagggcacatggtgatcacctgagattcccagctaaactcagacattttctactccaagaggagattcctcaaagggctatagcacacaggcagcatcagataatgtggaatgagtggaaggagggagggaggaggaatccataaatcatcaaattgttgttgagcatctttgagggtcctcaagaatacactagaccctgtgatgattccagggacaaccagcctgcactttctgaggagttcactgcctgcctggggagcaagacttgtatatgttaaattagcaaagaatttatgcaagacgtatgtgaaatcagtgaagaattctattctatctagactagagccagggagatttccaacacctggctcatgtatgctttttaaaaaaagatattcagtcttactgaagatgaatagatggatggatggatggtttctaacatctattgattgcttcctatgtatcaggcagtgttctagacatttttatgtttattacatatgtacttatacaaattatatgtttattaactcaattaacgttcttagcaacactatgaggtacatactgtcaatagccccatttaatagatgaggaaactgaagcacagagaggttaagttccttgctagaggtttcacagatggtgtacagtacaggcaggctttgcacccaggcagtctggctccatagttatatatgaaggataacgatgtggtcttttcaagagctgttggcatcttggttcacactgaaagctaccaggctttgttatctgttcctctggctttggcttcctgagtcttaagcacccttctcttttctagaacatagaccagcttgaaccaaccctctgtgattccaccccgcctctcccctggctgcaccaggcctctcatttgtagtttctcttactgagcacatttctaaacgaggacggttgctccactttaaggacatacaaatggcttgccctcacctgtcaagcatgatccttgtattttaccaggcccattatgaacgcaatctttctgttgaaaatttgcatacctcctttcttgaaaagtaatgacagcaatttctttccctccgctcactttctgagtgtctcatttaacggcacctgtgaaaccgacaggcacagagatgagaagtgaaagagagcagttgattaaatcatcatcaagtcgggcctcagaaagtcaattctgcttgccgtctgcaatgatatccttttatcttaaagtaatgagctatggcacttttgcatcgggtaatgcgataagttctattagcatgttccatttgcctcacaagcaagggcaagtcattttagctagctcatatcactgcaatcaaagcaattggcttcccaggcagagaagaaagggaaaaggctcagggtgatttctatggatcacaacacagcggaaaaaatagactcttgtattattttaacccataacatacttttcctttttactcatcagcaaatttgggttttattagcttacacaggactccaaaaagaacccagcatcagttgaagcaaacctgggggtgggggctcagaccccacccaaagcaccaagaaactatatatgggaagggaaaatcgccccattacagaggggtcacaaatagaattctgccaaagcacacaggcaaagatgtcttcctgatagtaacactgtggtctcataataaactcttgcttcacaccatcttcaaagtcatttgtaataggtccccaggcaagtacggattaatgctattgatgacttagaatcagtaaatcaatgacagagaagcaaaggatctgttccttaagcttaaaagagatcatttacaaatcaccgggccccagactgtcagttttacctttggacaagatacttatttttctgagtttggcaaccactgaggtttgtggactctgggttttaagtaaatttcatctttggggtttatgtatatttatacttggcaaaatgtgacttcctttcttagaggaaaacaagctgaactccccaaagatttgtgaaatattcacttccaaccccacttccaataactcaacaatactttaatgatctgtggaaatttacaacatacagattgttttatgaaatacacttggatttcaaagtgacaaaaaggaaaaaaaatattagaatttaatttatgagctttaaaacttcaagtttggacaacctgatttctgtcaatatatttgcacttctaatgggtggtagaatgaacctagcacatagtagttacctgaacattgttggttgaatgagtgtgttattatctgagacactggagggggaataagaagtgttcccttagccccctcagatcacattggttatttgagctctggccagttcaaactgagaacttgcaaaaatgtcagattctgagaactccccattcagaaatgctaggttatcagtaccgaattccagaggcttctgagagttgattctcttgtatctcctgaacaattgaagattggtggacctcatattattttcaaatgggctcattagtgattaccaaaagctttattcttgtaaactgttgtttggaacatgaatattttaattaggctttcattttatctgagctattttatttgatcaggcgtagttactgttaagatagaggggaagagtcgacgacattatttcacagtcagtaagaatatggtctcagtaagaacattttcaggtttaaaaatttaaaaatttctagggccccagtagctttaaatttcacttagtccaaaaccaatatgagagcaatgtaaacagtgtgaaattagggctttgtggattgatgaaaaacagacaacatcagagctgccatatgtggcacaaaatggcggcccatttttacatgagcaaaggattgggcagctgggcaggggatggtgaacgtgtttttagtcaccatgctgctatcttacttctttaaataagaaaataagtgtcatgttttctgcaggtggcttcttctgaaattgcttttaggtgagggatgtctttaaggtcttagataaaccgcctgccccaaaggagaatcgatttgttttgtcactggcaaagttaaattatacttgatgttagatattgtagtttacaagttggggttctccctcattttcctctcatttcctttaggcagaaacaagaataaaataactttgttcagcagtggtattcagccctgacatctttggtggcaatgataaatggatttgagatacgaaataactgttccagcaaggtccattgagcagaatagagagcaatgccctcctcaatgtcattgtatgtgatatattcaatgattgccactctgtgcttaagaatgcattccatcacaaggtacctagaattccatcttgttgctacattctgaatgaaacagagagatgtcacagaccttgactgatttcaatttggaccagagtcttaaaacacagataccgagattcccaaatgaaaatgaaaaatatttgcttttgaataaatataataaagtcataatcacatcttttttctgagccttttaatggaagatattttcttctgggccccaactctaggctctgctaacgattttaacctccctcagtatgttcacacatacatctctttgcgttaagcagtcatattagtgtttcttgtactttctctttggaatcacctgccttttaaatcatactttgcttatgctgcatggaatcaaccacagtttgaacaatactcaagaagaatgagattgacttgtcagtataattgagcatctattgtgtcccaaggcctagagatacaaagataagcaaggcactgtccttacctacatggagctcattctctggttggaaagactgttgtggcaaacaacggcagtacagttttgtaagggatggagatagaagcaattaagtctttctggaaaagtattggaagattcaaaaaaggaactgtgttttgaaggtgaatgtcaggcttttaggtagaaacttggaggaatagaattcccagtagagggaattgttaagtgcagatggctggtggcatgactgagcgtgagtgggcgtggttgaagcaaggtatgttaggatagtgccacacaatgcgaggatgccaaccagggccggaccacaagctgtttgcaaccaacctgctgtgagattagtatggggagtcaagagtaagcattgggaaacttttagagtaactcagtagcataattttgtgtttcataaatctaataattttttaaatgtattatatatatttgtttttctttttcatttttcaagaatttgactttttattatattttacaaaagtaattgtcgtaacatattagaaattaaagaaagcaaaacaaaaacaaatggctcttcaccacagaaagcttaagaagcattgtgttgagagagtggttgggatttgggagttgagggggattagaaacagaatgtgaagggtcttcataggccttgtgaagcatctgcatcaaatagaaatttaggaaatccactcttgtcaataaggacttggattagaaaaggaagagagcatagaccttggaaagcagtcattatcctcttgtaatgacaaaataaaaccctgaactaacgcagtagccatggccacagggatggagagttagaaagcagaatcaataacgtggggtgagagaggaagataagtccgctcaaggatggggtcaaggataaggctcttcacttacgcagttgagtgattgcttggtgatgctattaccaagggcaacgtgggagaggggcagtttcaggtgagcaaagatgttgagtccagatttagatggatacttgagtctgagtgttcgctgcacttcaacagggggcacatacccaacggaagcttaataatacttaacatttatcatctgtacatacttggtaccatgcactaagttgtttacatgtattaactcattctcctcttctagccatattttacagagaaatatactaaggcccagagagtttaaataacttttccaaagttacacagctggcaaatgtgggcatagagatttttgagtttcagcatatacatggtagaaaggaccaagggaatctttaaggtctcccttgaaagtcacatagaaacaatagaactccagatgcaactctggggagacagtgacattaaagaatatgcagaaaaggaagggccttgaaaagacagtcgcagacagcaatattggtgaatgggtgcaaagggaaaaattctaaaggatgtgcaattgaaacaatctaaataaccagcactggggaattttttaattagattatgttacaatccacatagcagattgcagtgtcgcctttttttttttttttttttttttttgagacggagtctcgctctgtcgcccaggctggagtgcagtggcgggatctcggctcactgcaagctccgcctcccgggttcgcgccattctcctgcctcagcctcccaagtagctgggactacaggcgcccgccagcacgcccagctaattttttttgtatttttagtagagacggggtttcaccgttttagccgggatggtctcgatctcctgacctcgtgatccgcccgcctcggcctcccaaagtgctggtattacaggcgtgagccaccgcgcccggccgtgtcgccattttttaaagtgatgttacaggataaattttactgattaaactgaaatatttgacgtgttatgtgaaaatcaaagcaggttccaaaatggtaggaattcatttttatttcttaaaatgtatgtttaaaagacgagtgggattatatccttaagactggaaagacttacaaaaatgtattaacagtgtttacctaaggattgtagatttatgggtaatttttaaaatgtatccagtaaatatgttttttttgtttgtttgtttgtttttgagacgaagtctcgctctgttgcccagggtggagtgatctcagctcactacaacctccgtctccctggctcaagcgattctcctgactcagcctcctgagtatctgggattacaggcgcgtgccaccacgcccggctaatttttgcatttttagtagagatggcgtttcaccatgttggtcaggctggtctcaaactcctgacctcatgatccacccgccttcagcctcccaaagtgctgggattacaggcgtgagccccgtcacccggccgtaaatttgtattttcaaaaggagaaagattgggtgggttggtttgttgtttaaggggtaagacttgtctgggaaaggaagactgtgcctccagcagttcacttttaattcatgaaaccaggggaagagacggtgaagatggaagttgagtggtttcagtattgagatggctggaaggactcaggtttaggaactagtccctttctaactgtgcatttgaggcctttggccaggcgtgcacacgtcctctttctctccttttgtgtgtgatggtttgggtcatgtctttgtctgaaggccgggtgaccatgaattcttatctgtgattgctgtaaggcctagttgtttctttttgtctcttttcatttcttgcttttaaaatggaggatatatttttagcttttcacagcgggctctgaaatcttgtcatggagagtacttcgtcacctcaagctggtagttagtgtgcaacctgtttgctaataaaccaaagcaggaccccgatgtcaaaatgcttaaaatggtcaaatccgctgggacgccgtctctgcatctgacatgccttttccatttcccagcctcatgcagaacataaacctgcatcaggaggtggctcaatgtgaactcttataaattggagtgggtatctagggattgaggagcagacacttcttcttttaacctttgaagaccaagaatcacttggccaaaaaaatccacagtgtattgaacttagggtgtgaaagctatacagtgtattaaatgtgaatttgagaccatgaattctacccacactgactctataaaacagcctccctttttcataaagcaggcccataaaccgctgccagtgaagcagaaagactccttaggactgtggctcgctttccgtctggggttgtcaacaaaccccctttatgagtggaatagacctcttgtatgtgtcgagcttctggctttttacagagtgtgttaggagccaggcaaggcaaacgttaggcgctgtttgctgagtgcatttattggctttgcataatttatgagctggaggggttgaccatcattcgtctctgccaggggctggcactcgaggctccagagagtggagctgtaaattggatggtgcgctcctgctgagctcacggcaaagtcctcaggtcagtatgggaatttaataccagaaatggaactgttttctcagcacaccatgtggaccccagtgcagcagagactgttttggcagactccacgactggccttgtcgaggagctgtcactcacccggcatgttgtgtggggagcctgagcatttttaatcggcttggcatccgtgctgcttccataatggataccagtaggtctcagttcttcaccatatgcttaactctggagacaaggtgcttctgggtatatcagtaattacttgatgcagaattaagtggaccttgaaattagaactggactgttggaaagcaggaagcttaacactttgatagaaataaccattcccagggacatactgccgttaggatagggggcacagtggtggttctttcccagctaccccactcctcgtcctccctgcacaccagatccttggggaggtgggcaaatgcgatgccacagccttcagctgtcattgattacctcacaaggagcgctgtgaacatctgggaacatgagcctgcctggcaaaatagtcttctgccttccacacccctcttgaattgagcgttgtcactcttgaaaatgtgcccagatcttaggaacctcacagagggcttaattaaaggcaatggagagatcacacaatcaggacagtattgttcctcatccacctgcggttctaggccttcaaagtcttcatctcatccaatttctttctcaactcatttgacttattacaataaagaaaccactcatcaggtcaaagaatgtaaatgtagacaatctgaggttggaagctgggttggaaatgatgcaccgtacttggttaaatcgctgtcactgaatatctgactaccctgtggcactgaggagccaatgggagaagtagaaaatgttctaatcctccagtctataagactgtgatataagttcctaaatgcttttactacggagtgcttagtctgaaaagaataagtagtccccaggttgtctcataatagcaagaagtccatttagatgggtgttctgttacttcccattaaaagctctctaataggagcttaaacaataaggtaacttagtgttttctgaataaaagtcctgaggcaggctgccctgagatgggttcagtggtccaattctgtcaggcattttttcccttggtcccactctgttgtttttgtactgagtctttttgcctcatttttgcaagatggctgctacgtatctggacatcacgttcttatacactcatgttcaaaggccaaaggcaggtggttccttcttttctttgtttactggggagacaaaattgtttctagagccctcagcagatttcagaatctcattggccaaagatgggccttcaaataagcgattacaatgcccagaggtttacctcttttcccatctttagcctcaagaaaaattgagaaagaaaatacctggcatttttaacctcaaagtgtcaggagaaggtacagactagggagaagggagttgtgaatggctgtggggatctagccagcagtggctgccctacaagcaaatttatttcctgtttctgttcaaagctataccaactcccatgtccaggtggccacactaaaaaaccttggcatcatcctagacacatccctgttacttgcttcccatatccatgtgttatcaaatcctgttggttctaccttcagaattgctgtgccatctgcttctgccttcctaaaccatggcaccaccttgggttagacagtggaatggctgccaaaccactctccctgtgacctgatttttccccactgtgcactctctccacgttcccacagaaagtcatcctcatggaagcagctctgatcatgccacacccctgctagtgtttgtatcccagcttcatgtcttactgctaaacggaaggctcctttagagccaggcctgtatctcaggtgaatttcagtctagtttagcagttccttatcaagggctgttgactgaatgaatagatatatttacctgctgagctttactctaacaaaacacatcccccagtttttcattgaatattgaattaacaaaacacttcattttttttaagttgtgttcttttttcccttgcttatcatgaggatcccaaagactggggttaattattaattatcactctctgcttatcccaaaccaaactcagtggttggaatttgggatctgtttgatatggtctgagtctatggccctaaagcatacttttttgcccatattttttatttactaccctgacctcttgtctttggcatactttttatagggaatgttccttctattctctgggcctctaaaccggaaaaggcagccatcacaagtggtgagccttggccattatgttctgtttccttcaaagttcaaatgagtgactacaacgcccagaggtttacctcttttcctgtagaaaagcaccggtagagatacagccattcacattagctgaagatagaatgtcttcgttaagaaattgattttgctctgaatttcattgaacaatcttgattcaccttaatcctgtggctgactcctagaggggcatcgcctctaccctgccatggtgggagggaagcgctcacttgtgtgattgagcaccttgctggactgacctgaggaagagccacagagtacaggcatcagatgaaatcaacaaaataacttttttgcatctggatagcattttgtttcagatgctgtttactagcacttgaactggagaaactctttctttccaggaagacagcattttttatttcctttacttatcttgcactttttttgtatgggggttgggggaggaggcatcaaaagcaaaaacatactcagttcttgcactaacccttattctcttgtcttcattttcagtgtgacagtgacagtgaccaggaagagaaggtaagaccccccctcccccattgtgggcacagcacataacacactgaacaccagagtcctcccacacacagctgcagggtaggatgccagcttcatgttgacaggaccttttctctttaggaaagatgggcattattcacacagtgacatttcctatgctatgacacgtttaatttgtcagatctacctttttttcatttaaacaagacctttaatattgcatatatgtgacactgagtttttactttatggaagatgactcatagactcaaaaacattttaaaagacaaaattatttattttaataaccatctgatttttaaaaatccatgatgagaacgttaaacttgctagtttgtgtttataatgtcatttctgcatttattttactgacccatatgcttttctgtacctattggccttcttgatagaaatgttaatggtctgtgtctaggaatctcatcatggggtacgggtgggcaagggaggtcagatgggaactgccctcttcccatccgggcggaccgccaggtaggaggacagttcttccagcaggtacatgctctgtttcgaggctcatgggcaccagcctctgtgtatccagatcaacatggatcaagaaaaggaactcagtttctgaggttccagaagattggatcacaactcggtaaagtgagctttctgctgcctgaagcaaagggattatttgtctgtttggtctttctttctagccgttccaatccccaaccaaagttccttccatttttactgctgctttatgttattttgaaaagagttacctgaatatcacggtttctgtattgcttggtatcaaaaggatggactcggcctcccttcccccgtttctggatctgtcctgtgccctgtgctttgactttcacctcctacatgcttgcggattttattcagaatgctgcagttagtatttagtgggatctttccaacaaacccagaatttttctctccttctctgctgccagcctccaagagagatctaaaggctcttgttctgtactgtcgttaatttgaattcagcatatgtagcctgttataaaatgcgagacatcatcatttgagcaggtcaagcatattcagatgaagacaaatggtgcttatttgatttccttaaaatcaggaaatgaaaaaaatgctctctggagaaatcatgttctgcctgacttggatgatagaccaatgcatgtcccccagataagaacaggctctcgccttgaggtttttatctctgaaggacggccaggactgtcagcttgctgacatgtgcattatccatgtcattttaaacaaagtgacctatggaagggtacgctgtgctgtgacatggtaatgggctgttggatgacagtgaaagtacacactggaaagggggctgtggattattcttttgtttaactgacaagtaggagctgcctttctccagcccccaggagccttagctccttggaagtaggactcctggtgtctcaggcagccagtgtgtagtgggtgccagggacatgtgcacagcagtaatggttagtgttcaagacacggtcattggcccccaaacccccgaggccacattcccacatggtgggcatcactggtacccagggagggactggtaccttctggccattccagatctatcagcaatggttgatctcactttctaagtctgtgccacttttccaaaaggataaatcttattcagggtcgtacaaccaagctgacattctttccttaaaaggaaatgtggggccaggcgcagtggctcacgcttgtgatcccagcactttgggaggccgaggtgggtggatcacgaggtcaggagattgagaccatcctggctaacactgtgaaaccccgtctcaactaaaaatacaaaaaattagctgggcattgtggcgggcgcctgtagttccagctactcgggaggctgaggcaggagaatagcttgaacctgggaggcggaggttgcagtgagcagagatcgcaccactgtactccagcctgggtgacagagtgagattccatcaaaaaaaaaaaaaaaaaaaaggaaatgtgaattccaaaaccatcaccagtcttcagcagtggtagaaggtggtaaggatgcccggttttgtgttccttgtaaatgtcttcaccagtggcctcaaccttgacacccaaatcacctagggagctgctacaagttccagtgcctgggcctcatcccaggtcaatgaccttggagcctttggggctgtcttgaaccatgggtcttgatgatcacctaactctggtaatttctaggagtaatctgcctctggttgtcagagggatctgggggccaatactgagagcaccccaccaggtcctttcccatcacctgaattcctgagtagttattgcctgggtttccatctctaagtgcaagaagtaaagtgtcggaataatgggtattgggaaggtagctcccacctaccactctgagcttgagtagatttcagggtaataaagcggatacatagttgtttataggcgagtccaagagtggcaatggcaagaagggaaggggtattaggagtgttcctcagattcatggcgcacctcctgccctgcacccccagccattcttcctttctactgtggtgatcctgcaggtcttaagtgggagccacaccataaccagtgttgacatcatctgcctctgttctgccccatgccatttctccagggggctcccaacaggagccattgagactctaattgccctcgcacctgcttggccctgttgcagttaagactgttaggcttccccttttggactgagattgtctggtgtttatcgccaactttaacaccatcctccaagacttctgctctgtcggagcctgggtccctgtcagcctcctctgtgaagaaacctcttgcctgtgcccccctcgaagccccagagctaaccagggctgctttcatgtgttgcttggaggattcgcattcgaatctgaattgctaatggtggaaaagatgccactcagtgtcctgggataccttcagcaagccccaccagggatgctgttggaggcaaaagtgaaacttgtcagggacccactgggatttctctctggaagacctgccattctcttactccatagggatctgcagaaccggcaggctaaaattagggtactgtgtttcacacagctgactgaattaagataaactctgctttcctctgatatgaagctgtaatttataaaatgatacccttactaattaacgtggaagtgactccgaaaggggctaaaaaagcagagctttccctaaatgcaggagacacacttgtgcacaaaaaggctttgatgagacactgagcaaagtatctcccttatcctcccctcccagccacgtgaatacattgcacattaatgtcagataaccacaaggacgttcatgaagagtagaaattgggctgggtgcggtggctgatgcctgtaatcccaacactttgggaggccaaggcggggagatgacaagatcaggagttggagaccagcctgaccaacatagtgaaaccccgtctctactaaaaatacaaaaaattagccgggcgtggtagcacgtgcctgtagtcgcagctactcgggaggctgaggcaggggaattgcttgaacccgggaggcggaagttgcagtgagccgagatcgcaccattgcactccagcctgggcgacagggcgagactccatctcaaaaaaaaaaaaaaaaaaaaaaagatagaaattgggtggggaattacagaaggctgtgaacactgcatcttagatgtgggattgttcttcactgtagtgagagctaagaaaagaggcagcacttggcacccttaatcacccaaattaagcaattattctgatcccccattcgaaatgaattggtatcatgagaacaaagaggcaacatgcaattgccaaatatttggcctatattttattgtttcctttctttctccagtactggcagcagcccatgatgctaagaaatatcccgtttggttatgaagttaatgtggagattaaaagtcattccctgttctacccacaccctttttcttgtgtatagcatgtgactgagctgattggaaggcatatagcccagtggccaagcacttgggcctcagtgtgatggctgacacatgtttctgactctgtccatttctattttgttgtggacaagccttggctttctcagctgtcaaatgggggtgacaacagctctacatatagtcctgtagcaattaaatgaaagcatttagggccaggcatggtggcttatggcggtaatcccagcacttagggaggccaaggcaggacaaagtgggctcttgtctttgagccctagagtttgagaccagcctgggcaacatagtgaggccctgtctctaaaaaaaaaaaaaaaaaaaaaaatcttaaaacttaaccaggcatggtggcatgtgcctatagtcccagctagtcaggaggctgaggcaggatgattgcttgagcctaggagtttcaagactgcagtgagctaagatcatgccactacactgcactccagcctgagtgacagagtgagaccctgtctctaaaaaaataaaaatatatgaaggcatctggctcagtgcctggtccatagtaactgctcaataaatgttagcttttgttcattttacttgagataaaatgagagaggacgcttgaaaaaagaggaagactagcatcctctttggaaagctggggttcttctagagaacctgctagagggtttccccagaatctgaggctcagcctttatcccaagggcccttctcctggacacaggctgaatggaagtgttaaattttgaagggttctgaaacagtgtctttttaaaccccttatccaaacatcaggccttcctctgagcagaacctggagccaagagcacgtgtactgtcctggagggatcaaatggtgattaagtgaattgtatagctcttgtcccttcagcaactgttcccaaatgccaaacactgtcggttcccagaaacccatcacaggagagatgttctggggtagggccagagcatctgtattttttaaaaagcttcctaggtaattttggtacacaactggttttgagaactactgccttatagtaaatgtcaaagggaaacatgatttttccccgtgtttaatgctcttgaaattttgactgcttaggagaaaaacttgaaagttgtggagatgttgcctgtgtgtgcagacatgtgccacccatgcttatgtctgtagataccgggcataagtatacatgcagtacacacatacacaatctcacagaaatgaatccttctccttttcctatcaatcttttaacatgactcctgattgcagttttttctctctgtgctgttagcagtaggaacaaccacctggagaaggtgtttgtgctcctgggctttgctttggtactgtgtcctgtacccaggacagcctactggcacaatggctaactgcaaatgcagtactaccgatttttcacacctgctttccctctttccacacactttttggtgcattcccttttttgtttagagacagggtctcgctctgttgcccaggctggagtacaatggcataatcttagctcactacagcctcgaactcctggactcaagcagtcctcccacctcagcctcccaagtagctgggactacaggtgtgtaccaccatactcagataacttaaattttattctgtagagatggagtctcactatgttgcccacactggtctcaaactcttggcctcaagtgatcctcctgccttggcctcccaaagcactgatattacaggcatgagcaaccatgcctggtgttcatttttaaattcatgctaaaagttgttgtgtttgatcattttatgttcacttgtgtgggaaggggcttctaagaaaaggagcaaagaaaaccagcaaagtcttatgttcctaactcaacacaaaccacatgcctaacttggctcgtgcaggagtcagaaactgctgagatgtcaaactgaagactgggcatgtggtttgtgcttacagtggaagagtcccatcccttggttggccatgtttcacactcggtaaggtttgtgcaccctcagcaacattccagaagctcagaaggccctcattgttgcttgtggaacccccagccttagttttcaaataggatatattttggtcaggagacagtttggaggtactgtcctattttgtagctagaaaggaatatctccacctttccagatttcatagcagcaaagcagacagccatcacccagggaaagagaatggatccatgttcttgtctttatatccctaatactttgcacagtgcttgatatgaattaggtgctcagtgttttgcaaaatttgcattttctttcctggatactcatctccaaacggaggggataagtgaaccaagttcagaagactcatactcaaacctgattgcacctcatacagtcgcaatgtctacttcctggacccccaaaatgtgtgatctcttcctcaggcttctatatttcatctacagttttctcatacaatatatctaagccatttataagtttcctaacttataaatagacaatttcttatggttcttggctgagtctcaggagatttttaatttatttttgttttttgaaatggagtctcgctctgtcacccaggcagaagtgcagtggcgcagtctcggttcactgaaccctcccactccttgattcaagtgattctcctgcctcagcctcccgagtagctgggattacaggcacccaccatgcctggctaatttttgtatttttagtagagacagggtttcaccatgttggccaggctgatcttgaactcctgacctcaggtgaccggcccatattggcctcccaaagtgttgggatgacagtcatgagccaccgcacctggcctaagagctttttattttggatgcgtgatttccgtgatgcccatctactcaacctcttcttaccccttcaggattttgtctgggttaaaatgacattttattgttcttccaaaatcatcatatttccaattggcttaattacattgcatacatcccaaatacacattgatactatccttggattaaatttctatggtaaattattttaaattcagaatctcattatctttttcatatgataacattttcaggcaaaaccaaaaattacttcacttatactgaacatgtatgtacaataatctgttcattactaccatgtcatgcacctgaaaaagaagttataaatgtacagattttcaattaaatataggtaagtcaacagaataaatacttgttattggaaatatgtcaggcattttcagctaaggttttgtttcttgaaataaacagtgagaagaaagaacaggttctagatgttctattgctcgcaataggtgggtggtggagaagggcactcagaagacccaattcctgatttctcactcaccagctgtatggccttgggcaagttacctaatggtgcctagcattagttttgtcatctggaaaatgaggcagtattcaatgatccaacattgactatccagattttccaaatagctatttacctaggccccaacagcatggcagaacccagagggaaattaatatgtgattgtatcttccctttgccaatgtggaaagaggattatataagaattgtctccattctttcgtctctctcagtcttccaagagagaataaacatataggggacatactcgggtatatgtgtgtgtactctcaagcaactgaaggaaacttacatacagacctgatgtctaaacagggtccttatctgtttgttggttcagtctttcagtcatacatatccactcattttttcacaagtgtctactgatgaactgacatgagaattatagttgcttaactctgatggaactgtcaccatgtacctgtgagtaagtagcagagcagttcatttaatctgtgttcctcaactactgtaagtatttaggaaagcatggggactaggtggagagctagcttacggaatgtgtttcaagaactcacttgtttggtaatgaccattacttgatctataaaaggaattgttccagaaacatcaaggttgagtgcatgattctgtgttcccacagaaaagttcctgctgcttccccttgggtgaatgagccatcgccttgggtgtcatggcttacctgaagggaaagttgtaaagccaaggaggaggctgggggaggtgatggctatcagccccatgaaattgaccatgagccctgagccacctgaataccaggagggtcatgagcagaggcatttgtacaggtgatgtcttgaacaacatgcttcatgttagtggcctctgatagagtgtaacctgggaggctctttggttgtcagagaatttgtcttatactgtattagggttgcagagtgttctgtcttcaatgaagatagaactttttggtcatgtacgtgtgtgtgtgtgtgtgtgtgtgtgtgtgtgagagagagagagagagagaaagagttaatcccccttgacaactcctggatggcaagatagttacagataaatgctcctcagaactgtgccattctagtgtgacaaatataatcaaatatctatattaggatgtgttaataattatctaaactttatactttaagaagtccccagattcaacaaatgaatggacttctgttttcttttttaattaaagttacagctgggaaggtcaaattggttctcttttatacaggttagagattttccctatcagtttccatgaggagcatgttgagaagttctagctgtagacctgcatgacctcttcaggtacccgaagaataacccaaagaaagctggaagcagctttctcccttgttgttctaaaccaggcttgactcatatacttacggagacagccgaatggggtctttgaaataaggaaagaccagtaagccctgtggtgggtggttgtagtactcaaggagcccagtttgggcttcatcttttctttctagtgctcttagtggtttttgaagttcctaatttcctggtctaaaaatatagatgctactaatgtcttcggtcagtgaaaaactaagattagggtcaataatagcaactaaatagtaataataagcaccacttcacatgaaagagaacattgcattattcaaaacacttttaaaaacatcattttataagatctgtttaagtatttattgtagggatctatatattctcacatacaccatcgttgaccatgtgccaaactctctgttagggcttttcaaggctttatcttctcaagcaggtgtcattgttttacaaataagaaaaatgaggcataagtgatggagctgagatataagttgtgtcttaggattccagaatctgggccctcttcccatgccgtgctgcttccccgtacgtcagtgtgagttgggataagcctagcagtgccattcaggagctcatgctgtcatcccctctgtgtctcacctacttgtgctgcaagagacctggatcctgtttatctatccaccctcacccccacccaaacaattgcactaactcctaaaaattcaaacatggcggtttctcaagaaacatggaacgaataaaatttgggtctactaacaacttagattgtacaggctcttctgaagtgggacttttttcttattttagcctggaatgcagttatccaaggtgagaagggaagggctatatacaaggtatatattttaactcttacagatgggtagcaaagtcagcccatgattaattagggatgtaggctacaccagtcggtggacttagcatgaaccatatttggacacagaactcagtcttcctttaagtgtctgtatatgtgtaaacatttaatattttattaaatcatagactccctgaaagcatcccatgcctagcatgtacttgacacatacggccctgtaaatattagtgttatacccagaagttgctttattggttatccaagtctcataaaggagaagggccttgcctctgtcactcagaaagcacaggaagagcagggctggagcagaggaatttcttctgagcttccagtccagagcctcatgaaccccatatggtccctgcagaccattttcttcctacgaccccacacaggagaaggggccatggttccatggtggctcctgcactgcaccctctaaggtagttttgttctgagttataattcgccccctcaagaaccctcttgtccatccccagacactgattctcaccctgacagaggtctgggtccatcagggccacagggccttttcttttttaacagcaaatgctgcgtgggctgttcctgcagcccaaatgatagtaaatacctgaagcagccatgtccatgttaaagattatgtatttgccactaaggggagaatatagtgtttatcggccggagtgcgtgccggctgagctgattacggcacaacactctgtcagccaatgatttgtcctgtcctttatcatctgtgtcactcagcagtgtgctggcgaagggaacggatcacccccttccctttttttgtacccattttgtgtagaaaatttgtatttactttgggagtgtaatttgttcctcatggataatgtgaccctgagcggagctggatcatgggttagttgaagtgatattttccgctaatggtagtcgtacatcattgctgtcagctcgggttaggaggcaagcacattacagctccattttacctctgcaggcatctgggattatttgccataaccgagtatgacatgaccgcactacagagtgcattaaaattttactggcttctcaggcaagttccccagctccagtgtgtgcttcaggcaggcggtctgatggggagtccaagggccctgacttcctgctcagaggtgctgcgggcagtggcctaagcaggggctactctctccttgccctgagaaagaagcagggaaagactctgtggggagccacccaggggatgtttatgtctctatacgtcccggactggcaagtgactagctgccttgtgtacataaccaggtgccgcccacagtggctgctgccatctgctctctctccttgatgacttcagcccccagggtggattaggcaaaaactccttctctaaggagagcccagggtaagtgcaagtctctgccaagccttgggctgatttgtattgttcttgtctgcctacgttcagactgaagaaaggaggcgtaagtcctcattatggcagaacccacgtccagccatgtagctggactgagcctgatagagtctcatcaacccagttagaaatgtttgccaaggtgttttacacattatcttatacagtcctcacaccaacccaatggagtgtaggcgtgattacctccattctacttataaggaaactgaggttcaaaggttctgtaacttacattatacagctaatggtagcagaaatagccttctgacttcaaattctatatggtttctagtgttcagtgctacagagagataaagaagtaactattgtttaaatagtgcttagatgtgctatacatatgttgacttgtttagtcttcagtacaatcctaataggtaggtgctaatattatcccccatttacagaggtgggaactgaatcacagaggtattaccgaacatgcccagtcttgctcctggttaatggcagaggcaggtttcaaacccaggtcagtgtggcagtgctcttagccgctaagctggactctcccacatgccacattccaataagcctgagagctgataggaaaagaccagtgaaaactgtaatacgttggaatacaaggaaatgttcaaagagtattttatcactttctgttgtaactctaacatccaacaaaatatcactcaaagaagatgttttgtgatgagctttaattaattaataagtcccatttgcagttagcacattacttgcatgcaaatgatgcttctaaggtgcttgaaaggtatttattttgataggttaagactaagcagtcactctggcaaatgctttattcttttatattcttattggaaaggctgtaataaacttatgttgaatcatgttctttaaaaggacaatttaaggttgtctcccagtaattagtgggatatggatgagggcccataggctgccatatagaataaaatgactgcagattccatattggtggattccgaatgctggacacttgaatgtactctcgtgcctacagtgtggacatgactttttgttctgacacggaaatacccctttttacctctctagccgcctcatcgctttctattccaagcttgaaatgttacccctcctggacagaatggacaagccattcttaccatcacctgtgtacatgatagggttgtaattcatgaatttattcaataagccagacataaagtgagttgtaccttcagggcagttttttaaatgctgcaacagaagagccatagataagcatggcttttctcactgagaaatttaaaattaagttagcacactaagaattgtcctccctgcccccgctcccctccttgggctcacaagcacacacattgatcttccctgctagattaccataggtccaggggattgaccttagtttctcctctagccttagatccaatcactcaagtagtaaagaataagaacaaaagtattgatccagtcatggaacagtaattatttctctcagatggtcgtttagaatgcagcaataattttaaataatgtattcctcagagacagcatgacaacatatgtggattatttagttggtgcgtttaagtaagttacacttgcaccctcacccctttactggacgtccaatgctgtgcaaggaggcctactttaagaagagtagacattgagaaaaatcagagtttacccaacaaatcaattaccaagcaattgttcattataaaggggcttatccattttctgtagctggacaaaataatggacctccacatgctcacatgcttacagtgcaactccacccttccgtatgaagagacttcatgaagtcattggatccttttgaaactcttaagttgtaacagctttgactgtgtttatgttaatagagttaccttttaaagactctttttgtttcaaataacatacattaaactaacaaataatgaaatgtttaggcttttggaatttaaatgtgttaaaataaccaaaccatcagaagggcagagccaggcaactggatatcagaaacagtgagcagagggctaaatgccctccttgctttgtctctacttatttttgcccgtccacttgaatcttgataatttcggagacttcgtttctccttttggtagaaatcatgacccatccacttttcagttttagctacaggcagagagactgtctctccttttccactgccattgctaagatccaagggagagattctgactggctgagattagctcaggaaaggattgtgggttggtgtaacttaagccaggtgcttacacctggattggtcagttatgggtagagagacgggaccatgttgtccaaatgtgcttctctagaggtgcctctgtacatggtgctggagtcagtagagaacccagaaagttaggagttgggcctgcagcagtgggttctaggaagcaaaacctaatcttcctgccatttggatgaggcactacttacaggcataaattcttgacagccatagaagctgcctgggtcatccaaagttgacactttatagtgatcacaaaatctcaaatatggatacgtatttacaattatgtataataattgcctaaatattcatagagtcattttaagtgctattcacagattagttctatcttgcttaagctattaaaagccatagaaatacacaggattttgtagagtgagagttcatgtgtacatgcacttagaaaagtccagaatttattaatattttaagtacacctatagtagctaatgaattactcccctgccccacccaagtataagacagccaccttgagagacacaaagatctcaaggaatgtcaattagtaaattacatatctagggtacaaaatgaaacttctttgtccaaagggattgtggtcaacctggagaatccaatttgcatgccatgcagtactacttaaacttcagcaggcagccttcctgaagtgatgttcctaagactagaaaatagtaactcactcatagcttctttcactcatgtttcattcaacaaatttaatcctcacttgtatgctaagccaagcactgtcatgggaactagggatgggaagaagacaaagacatagaaaaccttcagggaaatatggcctaattgaagggaaagctgaggtacctagatgaattacaagaccccgtagcgtatgctgtttctgaggaatggcatgatgtctgaatgcaaaaaactgagccatactctgtaagggaggaagcaattgagttagatcttgctgcagcacatggaatagatgttactaggtagcaagaatggggtagatcacaggcaaaggggatatcatttgcaaataacagagttaggaaaggcttagcatgtggagagaagcatgaaaacttctgtttgtttggtcagggtccatggcagtgttggggggaagatgagactgtaaacatatgttggtatacacagttccataaaaacaggccttgcacggcaagatgagagtttggacttgatccagatggaagccactgggtaccttatgtaggtgaatgacacatcagaattgacattttggaggaggattcaggcagtggcatgaaggatggagtgaaagggggtgaaagttgtcataatgggggatttgagaggtgatagagatctcaaccaaactaatgtggaaagaaggagtctgattttagaggcatttctgaagtgatgattttgtgaccactgggaaggggggtcaagggaggaatcgtggatgactcaggtttcaagtcaggctgactgggtcagtattgatgatgccatcaatcacacagcgaaagtggggggatggagaaaataggagctcagggaggggctttcaggaccttcagctggatgaggtcagaagagagtacatattgatgatgcaggagtgatcccaattttagttcagtgtctgggagacaaaactaccttagtagcagagatggagctataggggaatgagtgggaggccagccagaacactgggattttgtctgtgtctacaggaataaatatacgtggtgatgataaccattaaaaacaaaataaatactggggactagtagagagggaaggtagggaggaaggcaagagttgaataactattgggtaccatgctcactacctgggtaatgggatcattagaagcccaaacctcagtatcactcaatatacccatgtaacaaacatacacatgtacccccgaatctaaaataaaaattgaaattattttttaaactacaaaataactgtatattaatcgtagcacttgatatttgtatagcttttttttttactgtacatatctttattttttcatttgtggcaaaatacacataacataaaatttaccatcctaaccatttttaaatgtacatttcagtagtaatggtaagcacactcacatggttgtgcaacctatgtagtttttttatgccacatgtgttaaagtaccatatatagttcatttaaacctcataagaaacaccctggatgaaaggatgttaaatatttattttagaaatgaggaactttgaaacgggatgaactgaaacaaagtcgtaatgctttggtgataatatccccatgccttctagggtcagtattggggttataccacagtatccttagtgatgatattttaacatctaacttccagtggaccaaacagtaactcacttatagcctgagatcctattgctttccttaaggaaactggaatggaatcagccccacagcatgaactgggccacccagcagcagccaggtcgccgctctgagaggtctggttctgaggggctctgtgggagtaagacagcatgaggccatatagctttggatataggaaacgcctagaaaggtagagagatatgataccacacttccagctctagcaacatagtgctgtgtgactgcggccttgggcagtttactaatgcttctaagcttctgcttttgtgtttttttgtttttgttgttgttgttgtttttccttttaaaaatctagatataaaatacctagaattatatggcccataatagtaactactcaggtcaggcactgtgactcacacctgtaatcccagcactttgggaggccaaggtgtagaccaacctgagtaacatggtgaaaccccatctctacaaaaaaaataaaaattagtcagatgtggtggcaagtgcctgtagtcccagctaattgggaggctgagggaggaggattgcgtgagcccgggaggcggaggttgcagtgagctgagattgcaccactgcactccagtctgggcgacagagcaagatcctgtctcaataatactactattaataataataaggattcagtaaattttacatttcagtcccttccaccctgtttcctcctgctggtcccccaccattgaccgacttaccctgcaaaaaaccataacacacattagcaagattcatttattacagccaaatcagcaccccaggatcaggccttttaggaaatgggatccaaaacataagtgtcttaaagaggtagaagatcagagggctttgaaacatggccatgtcatcagtctgaaatttagaaagaagttccctgtggcaagagaatccgcaggaaatcactaagctttggaggcccaggatatacccagtaaagcacaggcggtgggcccccaagggaagatggacagcaaagacagcctttataatctgagtagatttcacccatgtccccctccacctaagctctggttttcctttagaggaggcttttaacttaattcctgttgaatttactaatgttgtgtggtgtgagattttaagtatcttctccagcctcctgggcccctctctcctcccctgtcccttccccacctccctatcctgtcttgaacttccaaccccaagagctcttctttacactgtttgctaaaatggagcctcttgtgtgatgcatacccaggaggtgaagctttcaggggtcctaatgtgtgcttcaggataagggcaccatgggtcccctgcctgccagtgtgcccctcaaagaatgtgggctttggcaacatggcattaattcactgccaatgaaacaatgatgggaattttaatgatagcgttgctgtctaaaagatgacgggggagacttctcagcgtctgtgatccagaaaacacactttctagtaagtatctcttatggtcagaagtgagagtgaaatctctgtcagtccttcctaagcattaccttggcaagcgctacagagcaatgtaacataggatgtgttcagtttaagtaacagaatgcctgatagtggctttgtccgtgtattagtttcctgtggctgttctaatgaattatcacaaacttggcggcttaaaacagtagaaatgtatcttcttggcatgctggatgctagaagttaagcatcagtttcactgggccaaaatcaaggcatcagcagggccacattcctcccagacgctctaaaggagaattgttccttgccttgtccagcttctggttgccaccagcattccttggctctggcagcatcattctcatctctgcctctgtcttcatgtggccttttcctctttcgtgtgtctcatctccgcctgcctctctcctataaggacactcgtggtggcatttagggcctatccagataatccaagaaaatctcacttcgggattcttaattagtcctatctgcaaagatactttttccttgtaaggtaacatttgcgggccttacaaaacacattcaaggcagacaaggagacaggcggtcatgtgtcctgtatgtccccttggctagaagagtccattcctaagtgtgagagagaaaggaaaagcaaagatctggcaaagaggggcaaggatttccatgacccatcatgattgtcccctgtgggttggcgttgtgctgtcttctgttagcaagaaagaggcggaggacatagtttgtgggtggtcgaagaactatgactgccaccaaggatgcgggcttccacacccccagtgtgtcagacaaaaagatctgaatgggggtctctctttttttggggaaggtaacgctgttttttaacgctattaaaaatctagatataaaggccaggtgtggtgtctcacgcctgtaatcccaacactttgggaggccgaggcgggtggatcacctgaggtcaggagttcgagaccagcctggccaacatggtgaaaccccgtctctactaaaaatacaaaaaaattagctggacgtggtggcaggcacctgtaatcccagctactctggaggctcaggcaggagaatcgcttgaacccaggaggcagaggttgcagtaagccgagatcacgccattgcactccaccctgggtaacaagagtgaaacaaaaaactccatctcaaaaacaaaaaataaaaatttatatataaaatacctagaatgatgtggcccgtaatagtaactactcgggccgggcacggtgactcacacctgtaatcccagcactttgcgactgagcgtttccctgctcagtcacactgataaaccaccatcgcctttgagtttctaactctgcctatctctggaatccactgaggaggaaagtgggcttaaggtttggtcttggattctgaaggtgcagacctcatcaccacctgctgctgtgcaaagcacactactggacctctctagaacctcagcaagaattcatacctcccaaggctgtggcaaagatgaaatgcaggcctcgggagtgctttgagctctagaccattccacgagctgctgttcctgttgtcactggacagtagggcccactgctgcttcatagcctaaagccaggtggagggagtccagtacccttgttgattctttgcttccctttcccttgtcagccacacccaccacacagacttccacatacccatgtgttgttgttgtttgtttgtttatgttcgtttgccagttctgacttaggagcaagcctttggtgctgaagttggtactgttctcactcctgaatgtaatgcccataatggatggagaatgtcaggggaattgtgggtaatagtaagattactgtcatattcccaaaccctggggtgggtgggaagaagcccctaaccatgcagctttatttccactgtgcttgtggtggggcctggaccaccttattcctggtggccttcatcttgggtgctacaggtggcaatggcaaggactgaagtggggagagtgaagatgcccgcagcatctgtgcctggccctggctcattcgtctgattggattgttagcaagccaaatatgacctggcctgcagggtacaagaagacatggaatacctggtaggcagctagataggaacgcgggacttcccagcagctgagcgtggagaggtggttccctacctggctacacatcacagtcactcagagtgctgtgctcagagaggcactttggcaataccctggacattccgattcagaagtttcttaggcaggtgtggtggctcatgcctgtagtttcagctacttcaagaggccaaggtgggaggatcacttgaggccaggagttcaaggctgcagtgagctgtgatcatgccactgcacttcagcctgggtgacagagtgagactctgtcgctacaattaaaaaaaagaagtttccaggtgaggtacaggaatctatatttctaaaagcaaccctgggactactgatgcatagcctgcctggcaaatacacagtttttaggagaaaaccatgagctttggggtcagggaaacctgtttttggtaacagctgtgctacttactagccatgtgagctttgtcagtcacctaccggcctctaaacttcagtatcctcagctttaaagctagtgtggtactaatacctgcctcacaggattgctgtgaggatgtaataagatgtttatgcacaggttatatgtatgcacatcatggtgctttaaaaaccctcaacttccccctaacccagcacggaagttcaagggcagactggcccactggctttggctctggtgcccccagccacttcccaccaactccatccatgtaagatttacatagccatggccaaattgttactgcaattaacaatcacacctaaaagcttttacttttacttttactttacttaaagggaactcttaaagagtgtttacttcatatcattagcaaatcattgttaattcttgtgatactcaccgtaataacatctatccaaatgaacatgtttgctcttaatgcgagtgtcatgtgcaatttgggagaaattctgttgtcatttagcattaattaatgcccacttactgtaaagtgttcagagacaccaatatcagcgagatttccagaccacatagacaggacagaagagctgggaaggggccagaagccactagcagggctgcactgtgactgaaggcagtggccctgggcacacttctctgctgagggcaggcaggccagccttctggctggaggatctaggtgtccacccataggtgttcagagcacacaactgggccatcccagcctggctccactcactgtggctggaaggggttctgcctctccatccccagcccttcaatcccacacaaccacctctgatgacctctcctcccagctgcagccaccttggatgttgatttttaacctgatttcacctggctgcacatgtcagctggtgggccctggagtgtgaagtgtgacttgcttgggcccctgcagccttgcctccctgcagcgacttcctgcagtttgactttggggcagcggctgccggagaagcctgaaagttgagctcaggaagtcatcttcatctccacccccaagcaggtgcttgatcaggactgtttattaatgtgttctattttctcaaatgcgtcctccaaaacagagtgtgtgtgagatactactcctgtgcctgggacagtcagtgtgacagtgaacagtgctgctctaggtgtggggacacagccttacgttccctttcttccaggcagctcagtgtagtggaaactacaataactgaccggggctgtgcccaccagctgtgtgagggggcctcagttttcccacctgtaaacggggctcactttacccaccccgtggaatggtttaattaggtgtgatgaagtcctgcatgccacaggtggtgcttagtagccatcgccttattaaaaatgccagtgatcaccgaggatcatgatttccctccccttgtgtccacacctcagacacgtcctctctccttctggaggggtaggaacagaggaacagtgcctctcacctgaggagggaacttctctgaatccaccaggaaacccagtcacaaatcacacagaagcagtgttcattttttctgtccacaaccaatatgactaaagtacggtggaaagacaagtattttttgtcctggtgaggaaaggtgccttgatatgtactttttttctgccttgtggatggactgcattggacagaggtgggggtggtggagggagtggaatttaccatggtggtacaaatgagtcagtctgctcaatagggatgtgtcccatacagagccgcagatgcctggtttaaaagactcaggctgcagttaactatgctaaactcaaattttactgagtggaatttagtctttctctgatgattaaaaggcccttcagaatcttctgagccgttttgttgaacagtgcttttttgttacttcctgggtgtaggaaatggtggggaacagagggttttgctggaacacccactggacttgtgtgtcctcctctcggtttctaagggcccctcaggccacacgcctcccatttccaagagagtgagaggggcctagaaaaggctgaacacaaagccccacaaccgccaaattccctttcaagggtgttacttagtaaacatgagcccttgagcccacattcttccagactgtgtctgcctcaggccacccctccttctagaaggagcagtgggggccctggcaggaggctgccggctcagcctggagtggcccacagcaatgctccaattcacagtgaaatgatttcctctgcctcgtataatttaacctgcccacattgctaaacttctatattacacatttctgtcaggatgtcagaagaaatgataagcctccttgaaacagcaacctctattacatgctaagagcattgcgcctggctccccccagctctggtccttctggtatgtttctgagatttttagcatggtctctcaagtataaagaataccctacttcatgaccccagcctcttgttagctgatagatgaaatcttttctaaagctgactctcttgtctattatgttttcaaaattcaaggttttagattcttggatggctgccaagtggccgggctttcttagtaggtgaattgctcctctctttttttgatccttaaacaggaagtagttgttttttagggtggagggaagcgggaggcatgttccacctcccttctccctttgttgatgtttccaggcaattggtggggaattttttcaggaatttctcctcggggaccatactttaggaataaacccaaacacggaaaagccatttccttgtctggtgggagcttgtgttttctcgctagattgtgtcacccagaatttgttgtggagcttcttgacaattgtgctgtgcacgtgactgcagcatggaccactgagggggaatagcaccaagctgctccatccacacgggagacacttgcgagatctcagggccatggacagtgcagctgcctgtcgctccctgcaacttactcccgacccgggcctcctcagagacagccacaatgcagacagtccacacataggatggctcaggactctcttcattattagctgtggttgtgtggtttccccgggagagagaactaagactgagtttcatttaaacctaaaagtgaggaagaacagatgccatattcctacccttagttgttaatttggattacaaacacccatgcttttcttcaggtcattagtcatgtggcttttttcttctttgtctcactagattctgtgggaacagatttctttctgcatagcatttagtggtgggaaaatgatgtttgctgaccatccttgaaattgaggcacaatgtagttcttgattaggaagactctggaataagcgcccaggagaaatggaaggtgtttggtttccaaaagtggtaccttcaactctttttgtaagctgagtgtgtttctctccaaagttcctagcccattagtgaactgtcatacacttcaaggccagctcaccactccgatagctaagctgtcatacatagtccagggtccgtgtgagccccagctcttttaaaactcctggctggctgtgtccagagaagacattcttatcagttttctcagttacttttgggaaaccatctcagagtgtaacctaagtctaaactcagacaaggcactgtgtgttttacaaaatacacatcccactcacctgggcttaattacctgtaaaactgaagtaatgaaagcagtgcctcaggcttctttgcagctcaaaggggatgggccagggattggaatgtagacctgggagcttcctttgggtgcctcctggatgaactgcactgtaggttcagtgagactccttccgggataagccaaggacaacagagccagactgtggggcagagggtctcatggtcctcatggcaaagccagccccagccctcagtgtgccctcatgactatgagtccagtctttacaacaggaacataacaattctacagaagggtggaggatctaacactgaacaagcaaggccccatggaccaggcccccaatagacgttacttcattcagtcatccccacagccccgggaggtggaggcatcactttccataccgtatagaggagggaactccccaccaactagtgaagtttaaaaccagcattccaagcagggctgcccagctaccctgcctactttgtcctgttgctgcatcttctctctgattcccctgaagtctgtgcgaagtgccacaggaggtcgaaggagggaccagaaaggtgagggtttcccggaagtagtggaagcggaccgtgtcctgagaggtccccagcccgagaaggaggcagccaacctcagcaaggacagcctggtctttttttttttttttttttttttttttttgagatggagtttcgcttgtgtcacccaggctggagtgcaatggcacgatcttggctcactgcaagctccacttcccaggttcaagtgattctccggcctcagcctcctgagtagctgggattacaggcatgtgccaccatgcctggctaatttttatacttttagtagagatggggtttcaccatgttggccaggctggtctcgaactcctgacctcaggtgatccacccgcttcaacctcccaaagtgctgggattacaagcctgagccaccccacccgctgagcctggtcttagagtggggtcagcttcggcttcctattgtgagaatcaggcctctggcacttatcagccctgaggcctggcttaatttacttcgaatgtctctgtctccatttcctggtctgtaaggtatcactggaagtgttctcaaccctttagtatgctttagtgtgagaaagcttgtaaaaatgcctgcatggtgccttgctggtgcccagtcagtcctgcatttctcggctctgcaaaatcacagacacatggaatgggatggtatgccccagaagaactgggggattgggagacctggcaggtgtgagccctgggtttgggaagggcagaaggtaagtggtgacagataagtctaggaaggcatttgggtgtcaggtcataaaggaccttgaaaaaccaacccctgggttagttgaagctttggtttagtttggtttcacggaggaacaggatgatgagatttttctttaggggaagatgacggcagcaataagagtgttggaaaagtcaccctgaacaacttttgtaggtaacttaagggcagaaaaaaggaactctttatttttcaagtggcatcatggctatcacagctcatcagtgcctggaacaacacctttaataatgtcaataggaacgcttcgaactgctgcagaaattctgcttcctgaatgtttgaacttaccctcccatttaatctttaaaccatcccttcaagagagggaggacacaagggtttttctcaattatgtaccactgtgagcttggcttagttaccaaaggctgatgatgggctcagcagtgggatccgagtccctgcgttcccacccaggcttcccaccattttcctcttaggtgcgcatccgctttgaagctgcattctctctgagacatgtggtggtaatgataatgttaatactagtaatgatcatagtaatcgctaacattgagaaagcatttacttattatatgccaggaatacgttgctagttttgaattgttttgtgtaattatcatctcctctttccaactaagaaaactgaacggtaatgagataaattaccctaggacacataacaagggtgtggtaggatagaaccacacccttcccaggtgaggagttgcctgtcatttctcagggtcctccgtggcacctggggacaggtggaggtgggcgtgggttgtcaggacatcaggggcctaactctgactctgcgtcaatcagagaagcttgatttttatctgtttcattggcctttctcaaaagagttgatttgagaaagtgttttttaaatagctttttaaagcggaaaggggccgtgtgcgctggctaatgcctgtaatcccagcatattgggaggctgaggtaggcagatcacctgaggtcaggagtttgagaccagcctggccaacatggtgaaaccccatctctatgagaaatacaaaaattatccaggtgtggtggcatgcgtctgtagtcccagctactcaggaggctgaggcgggagaatcacttgaacctggatggcggaggttgcagtgagccgagattgagtcactgcactccagcctgggtgatagagcaagactccgtgtcgaaaaaacaaaaacaaaataaaaataataaaataaagtggataggggttgattggggtttttcttttttggaaaaaagcaattaaaaagaagatggattgatagatacataatgagctgggtagatggggagacacatgataaagcaagtgtagtacagtgttaataaagtcagtggtgggtatataggtattcactctaaaataccacttttctctatgtttgaaaattttcataataaaatgttggaggagaaactagccaagtaaataatttctaagggcccttccaattttttaaaaaattttatttcctgcacttctctctacatcctatagttgtgatcatgtacaaccatgacgtgatcattaatctagatagatctcctagtcaccactggatgttgccactaaaaaaaaatctaggctgggtgcagtggctcacacctgtaatcccagcactgtgagaggccaaggtgagtggatcatctgaggtcaggagttcgagactaggcagaacaatatggtgaaaccccctctctgctaaaaatataaaaattagccaggtgtggtggcaggtgcctgtagtcacagctactcgggaggctgaggcagggagaattgcttgaacccgggaagcggagattgcagtgacccgagattgcgccactgcactccagcctgggtgacagagcgagactccgtctcaaaaaaaaaaaaaatctgctggggagaacaaagtcaatcatcactcatttggttctccaactacctgagcctaaattttgattggcaagtttggttgggttcagatactttcactagaaagccgtaggcctgtgagtctccagatgaaaggtgggtttagatctacacatctcctgtttcagggcagtgagctgttttggacccatctctagtagaagtttcttggagctctccagccacaataaaggtacagtgttcctgttcactcactttggcagagccttgaaaaggagcacagagacggtcaaatagtaaaatctaaaaacccgtagaaaaccctagcagaaagtattcttaaagacccagctgtatttttctgttcataagacccagataagcatagtcttcccatttgacattctgactttaacatgagagggagtttcatgcccccttggtaggacattggagtacttgttgcagcgtgcaagaagtggactttgtccagcttatatttagaataaccttgccagcacattccagggagttgatcaaggagttttgccaaactgtgataaatcagcacattgagcagcctctgatggctgataagcttgggagtgccagttaattgacaagaaccgcacttgtcaatcttttgaggtcatggaaatggatctcttgtctttctgcccttccccaagtcttcacccgcttgctctttggtagattgagcatggccttgcactgcatggagcacacctcccacctttgttcttgtgtgtttgctgagtaattaatctcattgtgctagtatggaaatagtctattaaaacattccggaggacaccatggagagggaggaaggaggatgaagactggcggagggagtagtttgctctgtttaattggttctttcacctaatggtagtttgtcaattaaggggatacttagagaaagtgaaattaatccatgtgggtcaaatgcagctattaatttttaatcaaaacacaatgttcaacaaatctgtagctgtgcttagtacaaatgtaagcatgccaccagcctcttcccaaaggatgtgggagcaggcacaggaaaggggggcctgttaatctagcaaatgtttgcctcctcccacactccctgtgaccctgaggtaagctccgcagagcttcgttcttgtctcttcaccatctattgcattgcctaacacatggtagatgctcagtgatattgctcttctggaactctttccatccctattatgtgcacagctttggagtacctcaaataggttttaggcataacagctattctctaagagctcctagcctgcttgagaaagcagaggaggcagttatgaatgcatccccaagtcactcagagcaacgtacaatcaagtacaagaatgtgtgataaaccgtggcatttgttgagcacttgctatatgccagatacttttaagcacttcacataaaccaagttttttaatctttgcaacaacacaataaaataagtaccatttttatcatcctattcataaataaggtcactgaggcccagaacatttaggtaacttgcctagggtctcacggctagtacaattagtctgctagagggttgcattcattacctaatattataagacccagagttgtcccaagagagctggcattgatcaggggttaaggtatgagtttattttggaaagtgccagaataagatgctccaggtagttggaatggtaatcagcacggttttgtggaaaaggagtgcatttctggttaactggaatatgaggttggtgaggttgaggtaggtctaggttaatacactttcagggtcttggataccaggatgagaaattttcatgtcggttattctgggatttctttattgtttatgggttgtttcactttggaggagcaagtcccgttcctctatttctgcacttgggcattgtgccctcatcattatctctcttacctcctctgcctccctccatctggcatctttcttctcatttatggcatccttagctcctcctgcttcccatttttagagagagggagagagaagagaaaatcaagaaagtacaccagccggcctacttctactgactttcagaggttgaatgaagcttttctcagccctctgccctcacctcagtttggtcctggaactttgagaggaaaaacaccagaaggacttggcctcaggaagttttcttctgcctccccttactgagcagaaagcaggttggaggaaccacttggctctgtgacatttatagtgacatggtttggagaggtcaggaaggactgtcccagtggtgtctcttcaggctgctcacaactgcctgaaacctctcagtaggagaggtttctcatgatccagtgaaaaatcaggcttcaggtgtacatagtttaggataggctacagggtatgttaaattccttcacattggccagaagctggagaaatgtgaggacaggtaaaatccttggatattttcttctttacttccaaggtagcttacaacctggcctcttgaagtcattgggctgatgataactggtggaaatttgcaggtaattgccaatgacaatgagggagagaattggggaatagaggggccctatgaagaggatcctctgcctcgtattccatgcagtcctatgggctgctgcagtaaacctgggaggtcatcaggattaccacaaagactcgtgattgggtgggtgtccctctgggcagcctagtttccctagacatacaacacgtgttcttctccagcagtgcaaagctgagaaggggcctgagtaatcgttctggtcttgctccaggaggcaaagccacagctgtctgtgtacccccatgcaagtgggcaggaggggttccagcaaggctgcttgctgggggagacagggtggagggaggaacagcgactctggatcatagagcagaggtcagggaagcacagttaggatggaaagtctcgggcagaaggtgggtagaggtggataggcagtgtacatggtgtttcaccatgtcatcttgaccaggaacacggtggagagaacagatatagctgactctgtgtgatcagtgattttaaaatgacactagtgtcagactcttaaccagcaagggaacacatcttgtaaatctgggaaaactaggtagcccaaagggacacccacccaaacaagagtccttcatgttgaagaagaagaagcacttcttgataaacaatgaaacaagctgatatggaagaaattgttatgtcatgggaaggaggacatttttggtacctaatgattaatatgaaataataattatgtagtgattatatccttgcctctcaatctaagaatactcagaacattgtcatagtgaatttcagtatcttctatgtgaaaagcagcttagctagtgatatctgttattcatgcattcattttttctttcctttgccatatatttaccaaaacctaatctctgctaggtagtgaataaggcttttgggatgcggcaacaaacaaaatgggcatgttcactgcccttaaaatgtaaggtgaaatacaacctttatagtgtccactttcctgcgatggttaaggttttcttcgtggacaaatacatgatcaattctatagctattccatgcacatataaagaaaagtgaataatacctgttcacaatctcaaaatacctgttaaataaaatgtatcaattttaaacattagtgtgagacaaaaacattaagtaacagattgtgtgcgtgtgtgcaggcatgtacagttagtcttgaaaagatcaattgggagtcagtggagcatttaaagcagggatagacatgatcagatttgtcatttaaacggtaactttggcagctgtgtggaggacggattgagggaggccagagtgaagatcagcagtgaggagagactgttacccaggtgagagaggatggtgactcagagtaggcaatgtgggggctgagagaagaaaaggagctaaattcttcttggagatcaaataagcaagatttggcaactgatggaagagaatgtaaaacaattatctacttcctaggttggttgtgggaactaaatgagacattattcgcttcattttacaaacaaggaaatagagactccaaagtgattgagataaacgtctgacttccacacagcctttgatctctctactgcacaaggcataaaaagggtgtaaacagaggtagattcacccaggctaatggctgaaagcctcaaggcccttcacttgctgggatctcatccaaggcctcatacctaattttatattcataactttgtattcattttcttaaaaagcaccctccacaagggtttaagcttcagactccaggaaacctctatctacctctggccaagtaagtaacctcattgggtaggactgaaacttgatgggatgagacctaggatcaaaatctgacccagcaggcagagaaagtagtgtgtttaggttgggatcaactgggagagaaacagatgccatattggaggcataacaaaaatataactgttagtgtttattgaatacttcttgtgtcaaacagtgtatttattgactttgattttttgggggaagtttcttgtattatatcacttaattcttatacaacccaacagggtggttgctttcattatccccattttatatgtgaggaaagtaagccctggtaagagtaagtaaattaacaaagtatcacaatactaagcaggtgagcagcactggcatcttacaggcctgactttgatgtttgaggctgtccttaacctccactgctagagggactgtggtccgaagccagcacctctgatagattcttgacatgtgctgggcatttcctctcctagaggttggaggaagcaaggtctaattctgtcctgctcctttccaaaaaggaattgcttggtgaaatgtcagtgggagaaagtaatcaccccaccttcagatacagagttgaggacttatctgacatgtgccggagaagacaagaagattctgaggcttgaggccgaaggagggcatcaagagactccagcagccttattttgttattatgcggttgttattttgactcaacagttggctctggtgaaggggagagatggggcttatatgcaacaacaagtgagggcgatttgagggaaaacatgtgacccagactaggagcattgtgtccacattaactgaagctcacagaaatcctaaggataagtagggttttcagcgtaattttgttttttatgttctgatcaagattaagaaaaggaggctttgtcctttgatggaaggtgtggtgttgatggatgacccagagaaagcagagaggttcacctcctgctctaccttcctgtccagaacatgatctttagaaggaaaggtatagaattttcttggcttaaagggactttagatccaagatcagtaaagagattgccttgaagatttaaatgagctcacgttttcctgacctggacaagttacctccccacatgctgagagatcttgtaaatgaaatcactgacccctccctgccagagatgttggagaaaggtgggacatcaggagagaggctgggagactagaggggggcaaatacattgcgaaatttttaaagagaaaggagtgttctgtagccacaggtcagtgagcatcaggtgctctacaggatcctagacccggtcagcatggagcaggctggtgaagaggaagcaggaatcaaagagtcgggtcactaagactggtcactggagcttagcacctttttttttttaacaagcttactaggcagttaccaaaagtggaaagggcagtcttactccctcttctcaaggtcttcgacaaggtcttttatgaagcctttgtggattcggtgggaaactgtggagtggctgcagcaaattggtgaatttgttgaactgaccaagttgatggtcgctctacagtttcgtcacgggactctgccctatataaaataatcgtcagtagttgggtaataattattctgcaccaaagttgcagaagacagaaagttgtgaggaaaacagatagcttcagatggccaagtcagaatttgaaaaagaaaactcattcatacagtcaacaagtatttgagtgtctgttacatgccagtcatatatccatcacggagcagctacttctgggttgattctcctagtatggatggtaagcaatgaagaaatgtgtgtggtgtctgcatgcaatgtcagatgatggtaaagaatatggaggaaaaatttaaagtcttaggagataagagcaaggtgtgaggggggtgctattatgatacagtgatcaggggcagcttctctaaggaagggcccaaataaagagaagctggtagatacccacaaatctgggggaaaactatacctggtataggcaacagcaagagcaaaggccctgaggctggaacatgtttggcatctctagaaagcctgagtagctggatatcagtgagagcaagcatgagaggtcagagcacagcttgtccttgcaggctatgggggatatcagatgtcctgagggagagggaagccactggaagcttttttgatatataattgataagatccgactcgtggtttgtttttgttttgttttgttttctttttaattgagtcagagtcttgctctgttgccccgcctgcagtgcagaaatgtggtctaggctcactgcaacctccacctcctgggttcaagcgattctcctgcctcagcctcttgagtagctaggaatacaggcacccgccaccacgcccggctaattttttatttttagtagagatggggttttgccaggttggccaggctggtctggaactcctgacctcaggtgatccgcctgccttggcctcccaaagtactgggattacaggcatgagccaccgcgcccagccaggttcatggttttagagactcagtctggagataagcttagcacagtgtgatgggctggctcttcaaggatagcatgacacacatggcttagcaatggtagatgcgagaaaggcctagaaattttagtaaaaattcaccctaatattagcaacagtgttatttgcctgaggaaaaaactaacagtattaaatggtatttggtatttacagtgactggtagggattggtttttaccctccctcccctgcccaatctctgaagtcttttaggataagaaccgattggttaacaaagcttcctggatgaactcagcaccttattcagctggccactgccagccccaaccaacagagaaaggagcatcagtgaaccagttctggtgaaccagttcaccccactgtgaaaactcaaaacccaggagatgtggtagatggaaataaggatgtttaaggtaaagagagcctcatggtcaaggtgaatcactggattcagatgtttggaagtctgctcaatagagagaggagattaaatttggccacagcagttagtactgtgacagatttcttttccatatataaaatatgcttcctagagtcaacgctatctaaacatggactgggcccacgcagcatctggctcatccctggacgtgtatgtaaactgaggctggataagctttgggtgcagttatgtagagacttaagtcagtaaatggacacaatgcagtctgataaaggaaagagggtggaggcggggagacaatcaggaggagaaaagaggcagagaagtagaagcctgtggttgtggagatggtctgtaaccccaccgggagcagcagcatctgaactggttctccccttgctcccctttcttttgccctccagccaaaccagtaacaaagggcattgtctagtagtctgtgtcagcaataaaagccatggggatctgacccgcggcagtgtgtttcagcctgcgaacttcctggatatctttacggggaatcattcccggggaaggaagggcaggctggaaataatataaggagatcaagaaggaagtcgagcaagtgacacctttaaacaggccaagcgagccgggctcttccccctgggacagttagagttatgcagagctgtaattaacccagcagcccactggatatgtctatttcaccgcacaaaggctgttgaaagaaggattcttgaagaaagaggttccaattcaaatggtatttgagtaagtcccttgtcggatatactgtttctagagtttatggctataatcaacaaaacatggccattctttcatgcaggtttctcatgactttctgaataccaatctttagaaagaaaaggggaaaaaaaaggcatccagaattgtctaggggtagaatgggggaaagggaaggagggggaaatatggctcgaatcaaattaaggacttggttttcttttcagaggatgttgaaaacatttaaaaagcaggtgtgtccttctttcataaatgaagactctgagatatgtaagaaaattttcagttgtgtattcaagtccctcaaaatcattttatcaacctccctaatttcaattaattttttaacaaatattttttgtatgcctaccctatattaggcactattataggcgctggggatattaatatctctctcctgccttcctggagctaatagtggggagagatagacaaaaacgtttaagtatgtagactaattggtgtgtgagatgatgtgctatagagagaaaaatagcagggagggaaatacagtggggagggatgcaaggaaggccttgctgagaaggtggcatttaagcgaagatctgaaggaggtgagatgtggatccggtgggtgtatgcgtggtggggtcagcgggtggggagagacagcagtgcaggcagtgtgcacagggattcgtaaggtagcagtgtccatggtagtgtgtgtgaggaatagcaagcaggctgaccgggccagagtggagagggggagagccagagcactgggagatgagggcagagaggtcagttatggctggagtctgcctttgccctcaataaggcacccattcagttactcaagtgggccagcacacagtggtgtgtcctcccacatgctctgagtactggccattcagaatggttcccatcacacttaaaaccgtagagaataaaattacattgtcactgtgctactcttcacccttggatagtcctagagtcctttggcgtagcttttacatagtgtgccacatcccactgtactccctttcctgagaacagactgatggaccgagttacgatttatatgagagaaccccaaatcagaattcctagccatgtctaatttatatatcagcaggcaagttgttttgtttcttgtttgggttttggggcttctgttttggggtggggtttttttttttttcccagtaccgtaacttataatctcagatcatggaagagcattctctaatgagctttctaaagccaagagctctacccagttgctgggtaaaggggggaacatggagaattagaatgtttacattgtaactgatttatgtacactatatttgcatgtaagtgtactaaaatattttttaaaattaccagccattaaaaatgtgtttgctaatggggataagaatgctggatacaatgaggtaagctttgtttaaaaggatttaggagactcacaattcataatcaatatttcaacacactcgtctgcatttttagggcaatagatctgtaagtagaaacaggcgtatttgaagaaaaacattagtttctgagatctggccagctcctgttcttaccactctgtcatctctgattggattagacgtcacagaaagggcctcagatccttgtttcacgttaagtttaaccactccagttgaataccatccttgtggagctcagtggagagaaattaaatttctatcaccagaagtatggcactgaatcaggtatcaagggggctacatcagtaaacttcgttggctacaagatgtatgtccttcctgaggctctgtagctgttaagttggctctttccaatcacagtctgatctttcattttcccgtaatgcagttagacaacctagttattcaggcatagacttctctgtttttcattatccctgaataacatttgatgctgaaatagggaagacgggaaggacgggggaggggagccaagcatttttcacagcttgtgtgaaatgcttaatatttgaacgtctttaaaatatactgtacacatacattccaattttataagactaacataacatgttcaaaagttttatgaatttcagcatgtaaccagagtaaacgttagcctgttttaaataagccataatggcctggcaacaaacctgcatagttagcaaatccctcctctgtttatgggcagccattcctcaccaggtcactacaaaatacaagttttatcagtttctgtggactccgtaagttggtctgtgtactgagttcagcatgaatctggttttaagagcacaaaaccaagggcatcatgatgaggtgatatttcgttttgattttaatgaaatggcatgaatctgacttgcttaagaatatgtccaggcctctcgtatcctgtgggggcaacttggttcctaaatgccttccgtaagcacagggccacacagacgtagcaggcttaccccttcctcactggagtcaagagagtgctttgtgcctagaaaatgtttgtttttttggtggggcttttttttttttttttacttaggttggaagcgccccccagatgatgctttttaaggtaggatctcctcttaacaagtgagagcatcaaacatgctgggtcatgcccagttccatcccatcgtgtgtcctgggtctaaggtattagacacagtcatgcctctcaatggtgaaggttctatgttaccagatcatatatttcatggaaatctgctagctcaccagataaaatcctcccagcttcttcaagcgtggcagaggagagagacttcccatgtgttaaaaatctgctaaactttgcagccccaactcttttgcccgtagactcaccctggcctcagccatccctcaggaatcatctaccgtagaccaaactggcttcaggggatattccaacccctgatgtactctggcatcaaaagctcctttaattacaaataggacaccagagaacaggttggagcatttaaataagactgatctaaaggctgtgggccaaagatttctcacagagggcaacacgtaattaggtaatctgactcacaagatgaagtttactcgctttcattgtggtgccccccagggcagccttccccacctgccctctaggcctgtgtccttgtagcacttaccacttgtaagcccagccttctgggagaccctcagtcaggtccagatgcttccagaggccgactccagactcatccagtttcttctctctttgtcttataacagtcatggtcctcattgctccctaaaacatcctacttagtatttagagctcactatacatctgttcaaagcttggcttttggaagtctttattgtaccagtcttcttacctcctgaaataaggaaaatataagtataactgcccacagaggcatataaaactcctttccatttacctcatttattcgtcttatttaggggaagcgcagttcagggtgggcagtctagtttaagccattgagtctagtttaagccgttgttcaccatcatgattttatagcctttagttttattccctgtcagccatagacatccccagagatgcaagaactcatgcaggaaaacccatttaattaggacccactgtgaaggaccaggaaacagaccctaaagcactttatgacggaagctgttgatcaggaaacaggatgttttcctttccctgggtttaggtctggctcatactcctttggggagatctgggggcctgtctccatctccacggaaacagaacctgtaaccttcccagaatcaggttaccctagagggcagtgacatttatatctgcttttttgtttgttcgttgttctctttcctaagacatgtaagtggcaggttttgaactcctggatctctgcccaggggcctggcatgttgtatatctgccattctgatgtgtggagggcctcctgtctacactctctctgccccatggctagagacagctcattctgagagattctttttttataggaaggcaaagctcacctatccctaacatgcaaaaattttcacttgaggaggcggggaactggtttagtaaagatctttgcgtgaaattgaatccagtccttgccatccttcatgttcaactcaagtcctccttctataatgaagtcttccccagccagaagtgatctttctctttccattacatcagggccttttccacattcccacctttcccccctcatactgttgactagttttatttcccattagtgctttgcaccctagtgctcctaggtccatttaaagacctaaatggctgggatcacatcttctacttggttatttcccccacagcattcgatcacttataaactgtgttaattttccccacagtgcctcacatagagtggtgctcaattacaacttactaagtccatttgaaaagaaatacactgttggtcaagaaatctgtgtgctgagtgcttcaagggacacaggcagtataaatgagacatcctgccctcagggaatgtatagtctgagtggggataagacgaggccacatgaaaagtctactaatagcggccagggaccatggcttcctacaatacaagcactttgggaggccaaggtgagaggatcacttgaggccaggaatttgagaccagcctgggcaacatagtgagaccctgtctctacaaaaaactttcccaggtatggtggtgggtgcctgtagtcccagctactccagaggctcaggtgggaagactgttagagcccaggaggtgaaggctgcagtgagccaagatcacaccactgcaatccagcctgggtgacagagtgagactgtgtctctttgaaagaaaaaaagataaaaaaagcaaccagtaatacaattccatataggatctgggccagaaaaaaataagtactgattgtcatgatcatggtgatacgttagttatcttgggtatatacactgtttttacccatccccataacaactctacaaagtagatggtgctagacattcttagtctcagctctcttgtctttagagtgaggacaaatgattcgtccagtgagtacagagtgctgggattcagacagctctgtgagccctcacgtgaggctcaccctgggttccaatggctcagagcttctcctcttgcttctctctcattacccttgtgccctgcccactcccaacctttcaaatatattaaggaggattaaccatattgttcactgctattaaacaagaccagagacagagtctttccagcagaggtgacaccttggtgtctgaatgagaaaggagttgtccaaagacatctgccccacacagaagaaaattagacatatcacatgcctgctttgttataatggcataaaagtatgtgtatgttttaataagtcatgtactgagtgtactcagactatagcatatccatgtgtattacggtggttaagagctcatctctttagtaacaaacaggggttcaaattctgactttaccacttacaagctctatagccttcagcaagctagttaacttctcaggacctgttttttcattgataaaatgagtggggtaatacctagctcaaaaatttgttgtaatatttaaatatgaatgtaaagcacagtgcctgaggtcactcagtgaactgtgattgtggtgagcatactgttatatcccttcctgagccacagaacttgaatttgtgttcagagctggagactccagaacatctcccaaagggaagcaatttaaagttgaagtagcctctcccttctgtcagtgaggatgccaggtcttttctgagtttcctgtaagtcctctaggatatgttactttggataaagtctcactactttgacctgtggaaagaaattactgtccaagtacacaatttattttgacctcccaacacctttggacaattccaggctggctccaggcttcatcagaacaattatgtcctctctgtggaaaacattcctttcaaatgaatcagtagttactcaccttttcttttcccagccatatttttcagttgccaacagtgggatcagtgaggggtagtggtgtagctaacattagcccaatatagataagctccagattatccgtcatcttgtttgaaaaaaggcaggcctgccaaatttgcctacagttcccagtgagggaaagaaacaacaggttctatgaagaggaaggcacagaactagtcgtggaagtcacttttccagactccctccgttactcaggaggaaacaaacccagagtgtcttcttcaaggttaaactccctagaagctgatggaacctggccagaggctgtgaactttgcacagagggcatcatcagaatcaccctctgctcagtggatcgctgccctcccattactctgctggcacgtacctgatttggttgacatttccataattaatttataacagcaataaccctgagatgagcctatttataggtttgtgcaagctaggtaagaatatagattaaatctcagatcattaacatacttaaaggacttgggagagttttgtgattgtcaaatgatgtgattaaaaggcctccaagcttgatgtgtactgggaatccacaagtttactttccttgccaagctcagaaacaacaaaatagcaaaagataagcttacattccacccattcaccaaagatgttgggtcatccggggaactggaccagggtcatcactgatggtctacagctgctgccccacagatgaggatctgtgagcgtggttctgacccttgatatgccagcaagtgtggcaccaagagtcccatgggaagaattgctgtgactgtccacagcaatagagatgagtgtgagaagcacacctattagttgaaaggatgctattatgacctggactgctgtgcagacccaatcttactttctttcctcctttttatgttctgttgttctggttgttaaccttctgaaaagtaacatggattgcttttctattataaaagtaagacgtgttcaatatcaaaaataaaggtaagtacagagaagaaaataaagatcactcataattccaccacccagaaatacccactgctgaatttcagtgtgcatccttctaatagagtcttcattctgacatcatgctagtagaactgttctctggacacagaggcctcccattcaggtgcttgctttgacagatgtgtttcctactgaggaaagcatcttatactcagggggtgagaatccatccatcaagaagaaggaatgactaagggactccctgccttgcctgcaggaggctcttcaaaaaactaccacccagaagtagttccctctctctcttctttttacatttacccagaccactcaaccctatttatccttttcttacctgtatatgcaaatatgatggcaccaccaacgtcatccacctctttcgttcaagaccataacttcttttaaggctctcatgagtccttcacaccaccctccagcatagagaagggctcttcacccattattcccattactagtgttcaagacttgtttttttttttttgctccagttttttattagcaaactagctacaaaatgctgaaaatcaagttaaagttaatacatataagatcatcataaatgattgcacatgtacacagataattattactttcatttgttttattattttaatctacaaactttgagctctttaaaagtggagattagatgttatgtcgccagacccttaacttcgcacttggcataatataaatacttgattaatatttattgaattaagatgaaaatgaagagaaaatttaattacccagtctactttttttttttctatctcagtagttaagtgcagagaaaaaggaggtcatataaaaatgatgaaaaaatagtaccttagaaccatttttatggtgtatcagtgcattttttgtgctaaggtatcactgttaaccctagtgtggaccctttttaatgactttttaaaatcttgacgatgtccttttcacttctttcctaaatgaacattaatataaagccataaaatgttccttggagggttttatgagttactgtgttgtaaggttggggaaaggacacttggagccatttgttttatggagcttgattctgaagtccagcaccgcccctgacccttcagaggcacgctctgaggcatgaagcctttcttgaggacagtgagcactgccacttctccccgaaatacaccagccacactcctacacttgccacttccccggagtccacagtgtcaacctcaagccctgccctccacgagtagcctagacaccgtggagcagacgttactgatgatgcattgaacagctcttcttccacagtgcagatggattttccgttcaccagcatgaatcgcttttgccatatataatatcatgtagtacctgaaaaaaaaaaatgatgccaaagactagagatttggtcgaggacattggtttttctggctctttttgcctccggaactcttcttcagtttatatcagatgtggaagggaagcctaatctataaaacaaagatgggggtttgagtccccggggtttcccctcaccactgtgctaaccctaaatcagctttcaccacttacttgaaaaacccagggcccagagaaaccaaggtgtgagagtgtgaaaggtaagtgcaggacagatagacgataacgagggtgatataaataataatagcttacatttttttaggtcttcttgtgttccaagcactgtgctaaacacagactgtccccccaaaatatggcaaattgtgatgcctgaggcagagtatggtatggctgtctgggaactcttgaaaaggatattggattgcttgcaggcaagaaacaggccagattatcttggcagatctcgctctcactgtggttcttagcctttattacactgttggaatgggtttctcacaagtgatatcaagggaaaaaactagacggatatgtccagtgtatgtgtacgtgtgtgtgcacatgcacttaggacaactttgagccaggagtgtgagccggattagcacactgagttgtactttattctaacacatgcagctcagtagaagtctcatcttaagggacatatagaatgttgaggtagaaatagctcagaagaaagttgataaagtaataggatacgtgcttttgccaatctacatggccatatccttgcatgcttattttgacagaagagtcacagaacagagcaagttcttaaggctcattcattcccatttccctcttgacattttgagcaaaggactggagggaccaatccataaggggaatgcacctggtcatcttttcctgagcatcttgggatcaggtgctcttgggaataagatgatacgtatacccaagagcacttgatcagtcaggcagtgagtccatcaatccacagccctgttctgtgctggatcccatacctttgtacctgtgtggcaggagacaggaaggatgtgtggtggaaactccaggaacttagtccagctgaggagatgatacagacattggaaaacataatggaccaccaggaaatgataagcttaggaactcagagaacatcatttctaggatgaccagagaaggcttcaaggaagaagagaaatttaagcagtgcctcaaaggttgggtgggatgtgagttactcagctggggcagggagtagtctttgcagggagggaaactgctgaggaaagatacggaggtgagccgtgcacattgttcctgttggaaccacacatgtgtaaaggctctgagatgagtttagtgagagttgaaggctcatgttgaaaaacactgtgagaggcacacccagtacagactgtggcaagtgttgaatgcctggcggagaaacctagagccttttaaatagttctgagcagggaagggaggcaaggaaagcagttaaactggttcagctctcaggacaaatgtaaaatgaagggctcatgcttgtgtgtcagattgcaggtttgcttagaaagcacagtgcagggagaaacccgaaggagcaggattctgtcttctggagccctaaccaagggaggccgaagttggtgctttcattgaacgtccatgttctgacatgaataaatgccacgtcatgagtttgtggtcaactcctgtggtcaacttttaagcaagctttaaaacaacagcaaattgcttctatggaatttctcttacagcatcttgacattctggaaaagccagtgcagcagtcaagggagtaggtcctgtcctgtcatttacccaggcttcctagattcaacacatccctgtgggtcccgtcacacatctcaccctggcccatttaactgagctgggcctactgcagaccttcagatatttaatttgtaaacacttaataaagcactgtcagtaggtcggcttgtcttctctgtcggccacatcaaaatcaatacgtcccctgtgtattctgccatgattgtctgggctggggaatctaataggattaagtgtttggggtcctatctgacgccacagtccacagtcctagttagatgaggttaaagactggcttgccattgtggaggcacgattgcttaggggtctgaaaaatcattaaagcttgtcctcttaaacgttgattgttccctggtgatttattgacaaaacacaaaaaagtgctctatactgcactctaattatatgtatgaggccataagatctcatgggaaattaaataaaatttacagcttgatggttttatgctcctgggagacataccttcttaataagatcttatagctgggaatatttatgaggttaaagtccgtaggcttgagcaaaagacctaacctttccatgggaggtggggatggggtgcgttttgatttctttgaagataaatgatcgtaatgaaattttcaggggtttaggaaaaagtgttcagtaagacacatcaagcatttctccttaaaacctctggaggacaaagctgtaagggcacggggatttactgcgaccatttgtctcacataaggcccccatagtcctactccccacctctggggcacttcgtcctcctcctgtactctctgtggcttcctcgtcttattagcccccatcacactttgaaaaggtggggaggatcctaattaagggcaatgatgtaagaggtcaaggaagggaaaggaatttgagtaaggaaaagggagaaagactgagagaatcaatacatgttaagacagcccccagaggagtcactggacatttagtattttaacgggtcaccttctctttatgttaagggatggctgaggaccaggctcagattccacaaggattatcctgtgctgttctagacaaagaatcagagcatatctgggataagagggatttggggggagggcctctgcaggtgtcatgaagatgaagatgatatttatttgttacctttcttgactctgaatagagtgcttatcccaacgtctccgtgaatcctaaacgaagcttcatgcttgaaagtgggctgtttcaataagagtgaggagcatcgtttatgcagccccattcctgctgctttctctaatagttctgaaatggcaagaaggaggtaggtaggtagatagagagctgtcatatatatatgtgtacacacacacacacataattcctatgtattgaattatatttttatctactcaaaggaggataattgtgtggaactcaaagcggttgggacatgtcatatgtgatctatttttctgtttattttttctattgagttttttatatgaaatctgcatggccccttctttgtgtggggggttggagatggggagggcattgacagaagggttggagatcaagctttagagggacttggaacagatgggcacatcacctctctggggcccctgaatttgagagctctgctcccagccttttcccaccaggggagctcatgactggctgtcttctactgtgtgctccagtttatctccaagggtcaagcaaccccaccttgagagctccctacctaggctcatgtgaaaagcaaaggactatgtgatgaggatgaatggatacagcgtttgacctgctagggtgaggcaagtgaattgagaagttcctgactttcctcattgccaactagtcatgttcctcggcttccctcttccagaataaaccaaaataaaataaaagggactgcaaatgcccatgacttagatgtgttagagtccagcttctgtttcccccatttggtcctgattttcgaagtgaaggggagacaggactgagtggcatggtggtgagcaacccgtgtgcttagcccagcggctctctggtttgtcattgtggtatccctctctggaccacagtttcctcatctggaaaatgaagatctaaggctaggtgattttaaagtccctttcagctctaaaatattattttacagttgtaggatttatggaggagaacggcattccgctctatcccttgctttagccttttgaatgaaagtgagatgtctcatcagctcagatagagccagctcaagcccagtgtctcagataaaaggagaaagaaaaaaaaaacttattaaagatagctaagttcccttgataagcagcaagtgagaaatcctgatttaatttaaatatgatatttctgtcttcattaatttaaagcatgtatatgataatgtatccttttttatttagtggtctgccctgaagggaaagaaaggcttgattgtgaagcagaggggcaaaagcttgggtatattttaataaagatgaatatccctaaaaatgcttgaattattatggaagtaagatttgttgcaagttacaaatcaaagcctgaattgtcacttatctcctaatgatacttctacacagattattaatttcattttagaagcccaatgaatgttatattttatgacattgattaaacatcttgctgccatctaaccatccatccttttcattttcaaaaatccatatcggaatttaacaaaaacagctcataaatttgtattttacagcctagcaaagttgactggttctctactctacttaccctcgggcccattctgaactctgggcttgggccatttccactcttagaagtcagcttttccaaactgacatcatgttttgtggtcagagtagtacttggggatttgtttggaagagcacgtgtggcttctggagctgcaaagccaccaggggagttctgaggtggttggggttagcccctgacgggaactcagggtctcagctttcattctcattcttagacaagctagttacctccctcctcagtatcctagggataattatgccctccccagggggctcccagtgccactgtggggatgaatgagacagtagatgtgaaaggtcttcttgctctttagaggcaagcagtgtggtaatggatttaagagccaataaagaacagtgagattgtaggtttaggatcaaccttaggcattataggaaaggtgtaggatgacttgaaagcagggataaaagccttttgaaaatatctccaccatgttattatttatcaaacgtttgtcaaaagaagtacctctggacatagacagttctcaaaaaagatatacaaacagccaataaacatatgaaaaaatgctcaacatcactaattatcagggaaatgcaaagtaaaaccacaataaaataccaccttactcctgcaagaatggccataattcaaaagtcaaaaaataatagatgttgccgtggttgtggtaaaaagggaacacttctacactgctgatgggaatgtaaactggtacaaccactatggaaaacagtatggagattccttaaagaactaaaagtagaactaccattcaatccagcaatcccactgcttggtatctatccaaaggaaaagaagtcatatgaaaaagacatggcgcacacatatgtttacagtagcacagttcacaattgcaaaaatatggaatcaaactaaatgcccatcaatcaacaagtggataaagaaaatgtggtatatatacaccatggaatactactcagccatgaaacaatggcctttgcagcaccatggatggagctggaggccattattctaagtgaagtaattcaagaatggaaaaccaaatgccgtatgttcttacctataagtgggagctaagctatgaggatgcaaaggcctaagaatgatatattggactttggggactcgggggaaagggagggaggtgagtgagggataaaaggctacatattggatatagtgtacactgctcaggtgacggctgcaccaaaatctcagaaatcaccactaaagtacttatccatgtaactaaaaaccacctgtaccccaaaaaactattgcatttgtaaaaataaatttctgaacccttcaaaaaaaaagtatctctggtttcacgagactcatatgtgtgtttcctcaaaaccactgtgggctcatcctttccctggattggctcccattaggggaccccgtgtgttcctgtcacatttccttctttataattgtgatctttatgattgctgttcatttccatccagcgagggtgctggcacctggatcgccatgcagggtgcagctgtggccagctcttcctccaggaaggagacctgaagagacgtattctgagaagcctgaattcgactctacattgaaaaattaaggactggcaaccaaaggctgtcacttgttgaagaaaaaaaccttaattaaaaaataaataaataataaataaataaataaataaataaataaacctaatgaagctgagggtcaaggggcatcgggataaactgttttgcaagggttgatgacattaggaaaaataactctattaaatcagaagtctgcctctgccaggtaatccttaccaaaagtatgcaagaagcttgagagatcagccctagaaggaaaggtgccaccccagtcctccaagggcacagggcacaggggttagcatgtaagcttgctagtcaggctgctgaggctcacatcttgtctctcgctgtacccttggggaagttatcaaaccttgctgatctttggtttcttcatcagcaatagccctgtcacctagggacattgtgaagattaaatgaagtaatagtagtatatgtcaagtgcttattagtgcagtgtcaggccaaagttagtgcttaataaatgttagttgttgtttggccaggcacggtggctcacgcctgtaatcccaacactttgggggctgaggcgggaggatcacttgaggtcaggagttcgagaccagcctgaccaatatggcaaaagcccgtctctactaaaaaacaaaaaacaaaaacaaaacaaaacaaaaaattagccgggcatggtggcacatgcctgtaatcccagctacttgggaggctgaggtgggaggattgcttgaacctaataggcagaggttgcagtgagccaagatcacgccactgcactcccgcctgtgtgacagagtgagattccatctcaattaaaaaataagtaaaaataaatgttagttattgttgtcacgcgttggctggtagtctgtggtggtggtgctggtggtggtggtggtagtggtggtagtggtccttttggtttcgtttgttttgttgtttttgtattcccccccccccaaaaaaaaagaagaaaaggttgcatatcatcactttaaaagctgaagcagagcttttctaggccccacagggcctttccctgtaggcatggtggtaaactggtgtttagggacagagcatccttgagtgaggttggctgctgaggacagcccctccctatttgggaggcaagggagttggtatgataggagcgttactgggagaggacggtagccgcttagtgtgaagacttctccagcatgttgtgaaatgttcttgagtgacacattttgccctcctttttctgactcatctacctcatccttctcctttcctcccccgcgcccccctcccagccaaccctccatagtgtgctccaacactggcgatgttgcataaagggaaaatatggcgtgtttacagagagaattttcaagaagtgttaatttaatatgctaaagtgttcccttcagcattttacctttcttgttgttttcacaaaacagccaagactaaataatgagcccagggctgtgccctttggtagcgtgatagctcattacccactagcggcctccatctgccctcatggctgcatagggagccattacgattatgatggaaatctcagaagccattaccaagatgcaacagagggcctactgcagacagcctaatggactaatttgtaattgggagagggaaatgagttagcgagctggggccggttttgatgagagtggaagtgcgcatgctaaatgtgataaatgaataggaatgtgtgtttgcacagtgggctctacaagctttccatctctcctggggactggaggcgtgctgacaagccgtgaggagcgaggaggaaaggctcaggggaggcaagcaagattcaaggagagtagctaaggataaatcggtgaggaaaactaatggcagtaaaaatccaaggaaatgactgcatctgccatgaaagtagtaattaggaagcattcggtgtgcatgtctttaaccgttaaaatagggggatgagtagatggaaggctggggcggtggtgggccaagagagaagcccctcgtagagggctccgaagggagagcatcctcagacctggtggtctgggcaaatgctgcctgctcagaacggagccgagtccagaaacaccacgggcaccgcccttcgaggggcttctggaacccagcaatgggaaggcctagcaagctcacaggcagccattgtgcaaggcaaggaggccaggctgcagtgccagacctgcagaacatctgtccttggagggctggagagtcgcttcataagccctcgtgcccggcgctctaagctgaggagtgctgggcaccagtgtggctatggacagatttctgaaagctggcctttccttctgtttgtcatttggctcccagcatttcatctgcccagcctggagagtgcgccaggtgccctcatggaggccggggcttttgtttccactcacactgatggacctggtgaagggtaatccccccagtcggtctgaggccaagtcctgcttggagctgtcctcattttctgtttctttttggcattttctgtttctttttggtgtatcttctcagttctgtcccctaacctccaagccctggtgttctttctcctcagtcagaccttcttagccctgaaagctgcaggccaagccttaatgggcctctttttcccagcaacctgccgtcctcaaccctttctctggatctcacttttcctcatgggccagcctgaattgagcctcaggatcgtcctagctctcaggattcctcctgctcccaaacattctcatctcttttcctgggaggacctttcagccttcctaaatagcctaagggaagacgcgtatcccttcagggaagaaggaagcactggaaccaattaactgaaccccagcccagggctcttagaaccctttcccaaggtgagacagccacgtagctgactctgcctgcagtcccacctctgtcccacgggctcacttttcccatcacattccctagtacacaggaaaagttcccattttcttcaccaagcactagaagaggtttctaattagctccctaatgggatgatgacagtcctgttcagcaaaattttattgtcagcctatttgattgattatgtgagtgattgatcccacctactttgaaaatgaatttgaggaaaccaacaaaaaacacagatacattgagaccccaaagcaactcattctgggagaaggcaatcaataaatacaaaaggcagaaaaacattctcaaaacatagtacaaattaaagaaagttattgaaaaaacacaaatgcggttctgctgtgacaagcagtcatagaaaaggaacaactggatgaatgtcatggattaacaatggaagcatattatttaatcaggggcaactgactttttcccatccagtgtccgctgttaagtatagcattggttatgtcatcaatatccctaaaccaagagcctcatcatacagtcccatcaatgttgtataaaagacctagattttctgtgtaaaggtattgcttagatatccttcagtaaacccccccagaatgtgtcaacctaggacaaagccgtagagagacgacaaaaatcaggttcctgctgtgcccaagttcccactttagtgacgtagagatttatacttgggtaactctaattcagttacacagacagtaacaaagcatttagaaaatgcacaggaggacatcatcaacacatttgacaaatgtttcttgagtacatcctgtgggcaggcactgagctaatcactggagacacagcattaaataagtgggagaacatggcccatatcctcatgaagcttatgatgatcgaattctgacccaaagaaggtatggtgtgaggggagtatttgagctgagctgtgaagctagaagttcattagaaatcaacaacaatgagatacccagcaaaaccccaaatatttagaaattaaacaacatatttctaaaaaatccatgggtcaaagaggaaatcacaagagagattagatactattttaaactaaatgaaaatgaaaatgcaacacatcaaaatctgtggcatgcagccaaagcaattcctcagagaggaatggttgtgttagattacattaatagaggaatgcttgtattagaatagaggaaaggtctaaaataaatcaaaattccaccatgaggaggtaggaaccgaagaacacagataaacccaatgtgagaaggaaggaaataataaagaaaatagcagaaattattgaatagaaaacaacagtagagaaaccaaagccaaaacatggttctttgaaaagattaacaaaattgagaaacctgtagctagaatgaacgagaaacaaataataaaaaaaagaacacaaataccaattcaccaagaatgaagaagatgttatcagtgcagatcttacagacattagaaggatcatcaggacaggagctcgacaagcagaggggaggtaacgagttgctagttctgtgtgggtttgtggggtggagagaaggagttgccatagcaggcaggagctgaaaagatgtgaaccagaattgttggtttctacagtgacccaggacctgtgtacacagcccagttgactgcaccctataccagcagagttcccaccgttgagtggtggtctaatgtgcatgttagaccatagatgccgagactgacaggtcaccaatggaccataatgcttggctttcagggcacctggacttgctcaaaacatcgttgagcattggccagtaagtcaatctgatagatctgggtccacagcccctagaacataggggactttatttctccctgccaacttctggcttctgatcattcagtctcatggatatcaaaactgacctgatgccatcctgaggccatgatatcatcctttccacagtttatatgcttctgaaaatggagctttctttttaaaagattaagtctgaatattcatggcagaagaagcttgccaaagctggctgctcacctccagctcccaagtcagtatcagcctgccatggcttattccagacccagacaacatcaagagagaaggcgggtgtggcatgggccagtttcatccactggtcacaggaccggcacctgtcagccatgaggctgtagacagggtcctaaagtgcaaagaaaaagctgtcaaagcttagttttctccccctgctcagatgtttacctggcaggagtgcctgccgtgtctttgtgtcattgttgctctttgtgcaactggccttccttattctctcattatcacacactctctctctctatctctgtctttcatctgtcctattattcatctgagtgtggactcaaaagaaccagattctgatcctgggcaggctccctttcctttacatatcttaatgtgaccatccataaaatgagggaaatgagagtgccatctcataggctcatggcaagttaaatgacttggtgtgtgtgcgtgtgtgtatacacacacacacacacacatatatacacataatatatatgttatatatacacataatatatatgttatatatacacataatatatatgttatatatatacacacaatatattatatatacacatatatgttatatataatatattatgtgtatatataatgtatatatattgtgtgtgtgtgtgtgtgtgtgtgtgtgtgtgtgtatttttttgagacagagtctcactctgttgtccaggctagagtgcagtggcgcaatctcagctcactgcaacctctgcctcccaggttcaagcgattctcctgcctcagcctcctgagtagctgggattacaggtgcccagcaccatgcccagctaatttttgtatttttagtagagatgcggtttcgccatgttggccagactggtccctacgtcctgacctcaggtaatccgcccgcctcggcctcccagagtgctgggattacaagtgtgagccaccgcacccggccaaatgagttagtatattttaaaagcactcagaccagaacttgacacctaggaagcactagatgttttaccaaatcacaggcctaggtgtggtgttcttcagccttcctggcgcctgtgttcctcaggctgaccacgctggattcctcttctgttggaagctcctccaccccacccctcccagtggagacctgcctgcctcactgcctgcaggcagcctggcccaacagctgcagtataggcacagggggcattgctcaggggtgcaggtgttccctaaccctaagttgagacctgagggtctcattaggtcctccaaacttccaagattgtatacttaatgaattggagggtttcaccttcccccaaatagccattgagcgaatccagccaccactcccgtcaggtcctggctgttcatgttgacactgatgctggcgagaggggagtatcttgaaagggcagaacaattggggtgaggatggggaagaaaagggagaaagagatgccctcaggtggggaatttaatttagtcacatgatagtagcatcaggcacttgtgttttacttttctcagaacattctcacatgcattctcttactgtatccttaccacaagtctgggagctagctgtggccgaagtgggtattttctctagaaacaaaagagctgaagcctaggaaggctgaaggacttgctcaaggtcatgcagctacctagagacaaagcggagaccataagcccagaagtgctgattcccagggctccctgcaggggatcatgtatagagagtcactgtgaactgctgtctgagcaaactacgtgaccccctcttggcaagacgaaaggccttggcttggagcaagatggatggagaacactccgggcccacactatgctgttttgaaactgtgccagagaagaggagtggcctggaagtgcagccccctctgttgggtgtttctgagaaagtgtttttctcctttgctggatttaatgaataaattataataacttttgcgtttttatccacattatgcatgtttatctgcccttcccccgtaaaccccctttcccacttccacgtagtactatatttcttttcatgttttatctttgggaacttgccactgataattatttttttaaaaagctcattcctagtgattgctggtaaagatgcacacctcttcattttctaaaaatgtatatgctcaggaccaaaaattcagggaggcatgtgtgggaaaaggtatatttccacttccaaagagagggtactttttcagaagctcagaaaaggaaaggggaaaatgttatatgagccctggtggtatgtgagctccttgggggaatacatggttgtcttatctgtctccagctctttgaatagatcttgcatgcagtagcatgtgagtacattgatggaatgcatgtaccaaggagcagctggatggctgatgggctggatggctaagtgagtgcatggatagatggatgcccaagcaacaaagtgaaacctcatttggcttgttgtgtcagagagccttcttaattactactctggatttcactgctatattctattctggccaagtcttggaatttctttatgttctaggtgggaaaagattacttctataattcatcaaggaaaatactaacttgctcccccagagagctgggggaaaacacattaatataaatataattgaggagtggaaacaaagtctaggaggagttaaagcataagtatcagcctggatgtgaattctaatataggaattagaattcctatattaaaaattgtattagaaacctttactttcttgtgatttctgttagttcagtaagtaacctttcttggaaggtctactaattcctttcaaaaaagatatttattttatatcttactataatatactaagcactgttattgctagggtgttttgaaggggcaggagatggtatttaaaactgagttgcagttctaggcagttaaataaaatccactgaccagaaaaaaatatgtaaaatgataaggcaggataagtattcactgccaaaaagtcaacaaagaaaatagtaaggatttatgttcagcaatccctgagattaaaatttaaaataaataaatagggatagtacgatttgaaatcggcgtcctctttgaactaggaattcaagactcagaataaaatggtccttttcattgcagagctgatctttgtgaccaacatcttgtctccaccaggaacattttagttgagaagcaggagaagtcattgctaagaagcttggattttcaaagaaacagatatcaaattgagaaatctctactaatctttcccttcagagtctaggcttgggtattttttttttcaaaactacatttattttacagataatcaagactctgacagagttttatgtctttttatcactctttatcttgaaaagcattgttggcctaaggttgaatcagccaaacactcagcctcatgaagagcttgtctggggcccatggcgaggaaaatgccagaatgtaagtgctttagagacgggagccataattgcaatgagaaggggagctgtggctggctctgactgccctgcttcccacattttcttttaacgagtgtccccacgtccccaccgcccctcccccccgacactcagatcccttcagttcccactggctgccattttcccttgctctgcagcctccaactccactccacttaagagaacagactggagactgctggaggccctgaagtgatttattgcttagcaggaacttcactaaacttcccaagttgattttttttagttttgaaaatcaaacaaagttcaaaaagtaaacatcacaggttgacatcccagcccaaagctgaggaaaaatgtctcttgttacattttttggcacataatagaatttatgagcattttcagtgttttgatttttttccccagtcactgttattccttaccctccagagttaggtgtggagagattatgttggcctgtttccatggtgacactgaagaaaagtaattttttaaaggaggtttctactgtgttatttcacatgcatgaaacatcaacatctatgctgtgtggctattacccctaaacataaagacacagaaatggttggagtattttatataaatagacaagtagggtgatattttccttggtctcgtgccgaccctagtaacaaaagtctctcagttacccagggcacctgggagagagtgagggaacagttctgttcagtgttaagcaagctcctctcctgtgaataaccttttctttaaaaaaaaaaaaaaaaaaaaaaaagctcaagttgaaagtccaccccccttctacttaaactagggaccagatgaaaagttccttttggggctcactgttcaaagaaccaggattaatctctgttttcgatgtagcttacttggtcaaccactgcaagtattccccttatctgtccaaggcgttgtctagaatcttcttgccccagtaaacagttgcttacagtctcctagagtgaggttggttagggtaagtatatacctttagcagcagaaatttggtgaaactctttccgccaccctacacatagacacacaccccccgcacatgcacacgtcacatcagcatcaatcacacaccccactcacacacaccacgtacacagtcgcacacacacaccccacacatgcacacgtcacatcagcatcgatcacacaccccactcacacacaccacgtacacagtcacacacacacacaccccacacatgcacacgtcacatcagcatcgatcacacaccccactcacacacaccacgtacacagtcacacacacacacaccccacacatgcacacgtcacatcagcatcgatcacacaccccactcacaccacgtacacaaacacacacacgccccacacatgcacatgtcacatcagcgtcgatcacacatcccactcacacacaccacgtacacagtcacacacacacaccccacacatgcacacgtcacatcagcatcgatcacacacaccactcataccacatacacagtcacacacacacaccccccccacacacatgcacacgtcacatcagcatctatcacacaccccactcacagacaccacatacacagtcagacacacaccccacacatgcacacgtcacatcagcatcgatcacacaccccactcacacacaccacgtacacagtcacacacacacacaccccacacatgcacacgtcacatcagcatcgatcacacacaccacgtacacagtcacacacacacacacaccccacacatgcacacgtcacatcagcgtcgatcacacaccccactcacacacaccacgtacacagtcacacacacgcacaccccacacatgcacatgtcacatcagcgtcgatcacacaccccactcacacacaccacgtacacagtcacacacacaccccacacatgcacatgtcacatcagcatcgatcacacacaccacgtacacagtcacacacacacacaccccacacacatgcacacgtcacatcagcgtcgatcacacaccccactcacacacaccacgtacacagtcagacacacacacacaccccacacatgcacacgtcacatcagcatcaatcacacaccccactcacaccacgtacacaggcacacacacacaccccacacatgcacacgtcacatcagcatcgatcacacaccccactcacaccacgtacacagtcacacacgcacacaccccacacatgcacacgtcacatcagcgtcgatcacacaccccactcacaccacgtacacagtcagacacacacacacaccccacacatgcacacgtcacatcagcatcgatcacacactccacgtacacagtcacacacacacacaccccacacacatgcacacgtcacatcagcgtcgatcacacacccctcacacacaccacgtacacagtcacacacacgcacaccccacacatgcacacgtcacatcagcgtcgatcacacatcccactcacacacaccacgtacacagtcagacacacacacacaccccacacatgcacacatcacatcagcgtcgatcacacatcccactcacacacaccacgtacacagtcagacacacacacacaccccacacatgcacacgtcacatcagcatcaatcacacaccccactcacacacaccacgtacacaggcacacacacacacctcacacacatgcacatgtcacatcagcgtcgatcacacaccccactcacacacaccacgtacacagtcacacacacacacaccccccacacacatgcacacgtcacatcagcgtcgatcacacaccccactcacacacatcacgtacacagtcgcacagacacacaatcacttcttgaggcttcagacaggttgctttatctagggcaagtcaaagtttggaaacagaagaggtcatgatggattgttgtgctgtttcccttacgtgtaaccatggttagactttcttgttatgtaactgagaatacttggtttttggaaaataaaatggagagcactgctttatcttggagaataatatcctcatgcatgtggagaatgcctttaacttttccaaggttcttcctacatgttatttgaatttcctaataattctgaaaggtagattttcttggcattccccttattttaaagctgcagggacagaagtttgcgttacctgttcattaggggcatagctgagtcagggattctggaccctcggttttcgctgaggtcctgtgttattaatcctatacttggcatcttccacacagccagtctgagaaagcacagggcctgcagcttcctgggacagggtctcagacacgcagagaccatcaggaggagttcactctgctattaacaaatgtttactgagcacctgctacacatcagacactactccagccgcaatagtccaaacagtcaagaatccctacattctatgagtacaagggaatggtgagtgaatgagtaaaacacataatgcatgtgtcagatggtgattagtgccaaggagagaaagaaagcaggaagaggggtagacagaatgctgggagtgaaaagaagtgggaagaggtgttattgaggggtgacattggaacaaagatttgaaggtgctaagggagcaagttttgaggatgtctggggaagagaagtccaggccaacagaaagatcaaggagtgtggaaaccggcatgcgttgccttcctgaaatccacagagccgcatactcattgcatgtgtgtgtgtatttgaaaacttcttaaattctgaggttggtacatggctttaatttttgccttaatggcttcctgcacttggggagctctttaataggtgcattctggtagtagtaatcatcagtcctgggctggtatcacattacctatgtggaaaaaagcagaattgctttggcactgattgggtcttggggtggtgactatgttttcctggtttttaatgcagatcattgaaaacatgtcagggcctggtctcaagtgtttctcttaaatgggatagaatcatgttcttataagcagagggtgtaggaagggactaggtggggggttggtgggcagaagggttcttatattttaaatgccagtcagctgcaaccactagttaactggagcctgttcaaactcatttggagaacagttgaatttttaaagtgccttttgattctctctttcatttattttaactgatctgctgggattaggagcttggtaggggaacaccagaatgcttgccaaaatgtgtgaataattagagctgcgatgatgtgtgccagatagaaggggagtattcacacttctgattagattcagctaaatgcagttgtaaatcactgctgccacagtaacagcgccctgtcaggactgagcacaagaggaggctcagggcagtgaagagacgcagggcagccccaaggcatggggctggaccgaacctttgtggaagaggagggcaaggagaatggctccagtcaccagcagcccctgggacattggttttggcatctctctttcagctcacttctaccgtgttgagtcttgctgggcactgaggtggccaccatctcagcaaatgcgagtaagacgggtccctgctctcgggatgcttacagtctcacggaaggtgaatgcacaactgtggttcagtgtgatgcatgtgtccgcaggacagacattgtgctaaagggtcccagaggaggaattgggcctgctgaagggaaaggagaagggataggtggaaaggcagttatttccttcagagataaaagttgacatttcagagtgctcagcaagataagttagtggctggaggagttccaggcagagggaacagcacatgcaaaggcacagacaggcaaagccccacccagtctaagagtgcagtcctccaggatggccggggaactgggaacaacatggaagaggctggcggtgcaacttggaaacactgcaaataggttgggtcagaatgtgaagggtctcaagtgctcataggaggaagctcttcttccaattacgtaccactcccaagatcccagctaccccttggagagggtgggtttcccacctcagccagagaaccctgccttagccacagtcatcgatgggaatgtgttagtattctttggacaggagaaataaatgttgagaaccattgctctcaccagtggagagtcttaggaggttaagaaggtgaagaggaactataagatggttaagttaaaaagaaaactggcagaagctttggtgtagaattgttagtttacagcaaggtaagtctgcaggctcccagatgtagataggaggttacagtcaaggtctgaccaaatgatagaatccatttcaagagagatttcagagtggaatccagtcagacttgttgaggaagactccagctgtgtgctgggtttcttgctcctttctgaaccatccttgcctgatcctgacttttctgtacgtgtggagtgccatagctcaagacacgatgtccttcggaaaatagacagtgagtgtatatgttttacagtattgcccaagaggtggaatcctgtcatttcctaatcacaactacacgtttcctccctctccagcactgctctgctccctttacctaaggttgctaaaggtactggtggtcttcaaaaaaaaaaaaaaacaaaacaaaaagcaaatacccacctcttactcaggacaccccagtcagtggatgccttctctggcccctctcccgtcctgttcttggaaaagcagcctactttctctgtcctgatcatgcaacaagttgctctgaaatgaaccagcagcttgtggtgggaataaaagcccaggaaaaggaatgcagaaggaaagtgatggaacggcatgaaacccaaagcaattgataaaaatgagcaccacatggagaatgtggaaaggagaggcaagcataaaaatcacaaccacatctgacatctctagaaatggagagagacaaatgaaatctcacatgtggctttcctcaagtcagaaagattccgcttctccattcaggggcgggatgaaggagcctctttggaagccgtgggcctttctcaagttgttctaccacgcctttcatttctcccgcttcagccagtaagttcaagtgcttagagaaatgcttagcctctagcaccttctccaggcacaaaataatgggttgaccaaattgataattttttttttttttgagatggagtccctctttgttgctcaggctggagtgcagcagcatgatctcggctcactgcaacttcagcctcccaggttcaagcgattctcccgcctcagcctcctcgagtagctgggatttcaggcatccgccaccacgcccagttgatttttgtatttttagtagagatggggtttcaccatgttggccaggctggtctcgaactcctgacctcaggtgatccgcccgcctcagtctcccaaagtgctggaattacaggcatgagccactgtgcctggcccgaattgatacctcccaaagtatgcatgaaggacaataatttgagatatgaggaaaaaatctaaaatgactttttctacttatttttatctcacctattcagatttatttcgtgaatgtgtattttagaaatacattagtatactggtatatcattaagcatatcaataagtaaaaatatctcgggcaagttaaatgagttatttgtctgtttttactctggggggcacatgatcagaatgtgtgaggactgggagagtagttagcagtgtcactagctgaatgtggggccaggaagaatgctctagaactgtgagtccttgtggaaacaggggcattaactggatcggctgcctccttctagcctatgagatagcctgttagcttcccttgtagctcaaagagcccctggaaatcagtagtcagaacccagagaaagggaagttctacccgtaaaagagatgcccatgttttcttagctgatagtcactttgcagagccacacccacaggtgacaaaagcacagtggaacttaccctcaggccctttcaccatcacaggcctctcttctttcctggttttgtcgttgggtaggggtggtggtgttgcctcccggaaccctcatccaggctacatgagacatgcagacatgctccagtgtcatgaacctccccctcaacagctccttcccccctttctccacaacacaaacaaaaccatcaaactccatatgattgttataatctaactgtggagtcaggaatactgtgctgccctacgtgatgctcttttcatttttgcagccatctagctttcttttccccctaccccagcaacccacaaacttaaactccaacctagttcaacctcagaaatcccattaatgtcttagaggcaggtggcctgaggagcccttcacttctgctgtcagctgtgtctccatggctcaggaacttaccctcccacccagccaggctgctttccctgtcaatagcattctcattccctccatgtctgttagaacttgaccattagtcaagctgttcctgagatgtgtctcttgtagagatgtacactggttagaaatggaagcacctccgtgactttcctctccctgtcatggtgacagcagtgtgacaggtttgacagttccagtttctaggacctccagctgcaagtgctgcttcgaccatgtgcttacgaattgcttcaggtccacctcgtaccctttccctctccagccatgtttatcttggctccgtattaatggcacaccttctgaatgttggacaaagatagtagctcttgtgtaagaacacactatcgacagcaaatggaagatgttacactttaaggctgccagttgtccccacttgtgccatactgaaataggagatggcctgcatctgtttgaaagaaattgagtgaaataatagttggtgagtatagtcctgaaggcagtgaactgtgatggaatcaaggatctcttcctgttagagtgacttttgcccaccgcttccagtggtgcttgtagaacttaggatctcaagaatattttgtgtcccctgcagaaaagtagcaatgcaggttgttcacatccagaggtcatgactcccaacagactttgtttatagcagcccaggctcagtgaggtgtatagtgggaagggcccagtaccacatgggcagagaagcactcattaacttcctacctggttgtaaacattagaaagttcccattcagaaaagtacttaacagcaaatatcacagctatggtatagtcctgttctgaagcggatgtgttttacaggtgaagacttcaggaaaacagccaaagaagatgtgatcttccaagatatcatgtaccctccattgtttgtcagtagaggagttttgggcatttagggtagactcctcccacacatcacaaaacacttagcaacactgctttgcccattaaataccagtatctatcaccatcaccttgactcctgaaaaacagtcccacacagttgcaagtgctccccagggtggggaggaaaggagcacttctccagagggagaaccaggggaaacgaggtagcagcacccataggtgtgcctgtgcactgggtgcagctagtcggttatttcactcagactcttgatgattcaacacattttggaaagagaaagtttgtccccaaaagaggcacctgactggcccaatccattgtcacatgttaatggctgtcacatgacagccagttgctggatctgtttatgtcaccaaatagtcactgtctaattagacttacaaattctaagtgtagcattagatttacaaagtcagtaaactgtgatgtgtgcctgtgttatctttcatgatctgacagatcatgtttgaaaattggcccaagctaggcccagtggtttgtacctgtaatcccagctacttgagaggttgaggtgggaggatcacaacatcctgggaacagagcaagactcccgtctcattttttttttttttttttttgagatagattctctctctgttgtccaggctggagtgcagtggcttgatcatagctcgttgcagccttgaactcccagcccaagtagtcctcccacctcagcctcccaagcagctgggactacaggtgtgcaccaccatgccctgctaatgttttaaattttttgtagaggtgaggtcttcttatgttccccaggctggtctcaaactcctaggatcaagtgatcctcccaccttggcctcccaaaatgctgagattacaggcgtgagcctactgcacccagcccaaaattgtttttaaaaataaggaaaaaaaaaaaaagaagaaagaaaaccggccaaaatgcagagaaaagtttgactatcaatgcagcattactttggttttattttacatcagccatctcccctccgctcaagatttgaggttgcttgttagttgaactacttggcaatgaatttgtcattgaaacaaaaattttgaatttttgaatatgagaatttcattaataagtcatgaattgtaagcttgggtgtgaaaatctttataatactttatagtgagacatttctcatctgtcgtcttgcaggctactgcacaggagctcgagtacatagatttgttgtcaattaaatattaaagctttataggctatttttatttccttctgcttgcattccttcctccagctcctaatagccacatgtccagtctttaaatggagccaggtttagagaggtctaatgaagagggtttactgaatggggaaagggcagccaccgtgaccccatatcacacctttgccacacaatcagagacctctgttgaagctattctggaaaagatctattcttaccagaagctgtcctgcgctgtcagtgaaaagacattaggtgcaggtgtcaaacatgactaatgaggcatgaggagtcgacagcaaaataacagagattatgggcagagaggacttgcagatgaaatgtgaatagcagtgtagatgtgtgagtgatgcaggaaggaaggggaccggcaccgaggagcagtagctgtcccacttgcgggaaggttggacaatatcagttacttgattggtatcttctcctttgatatattaagtggacaaacatctaatgttttcctctcgaaatcatgagtttcctgcaagtgtttggggcttggtatccacgtttctgtaatcttctaagacaagccagaatctttttctgtttttatatttacacaggttttattgtgaaattgtcaggaaggatgaggcatgtttcactcattaattttcattgtcatcaaaacatcagagttacagtgcagtatcctgctattccagggcccacaggagctctgattgataacattctaccttcacaaaggttgtaatctaaatggaagaggctggaaaaagaaaaaagtatgattagttgtagttgtgtcaaaagctgcctctgaacagaccaatacactaagcaatcagagatttcaagagaggtagcagggcctgagactctaactcagtgaatcttgcttcaccagatgtggagtctgtctttggtggtttcgcagagcctggccctgagcctccatccactcagcgctcaatagatgactgtaagcatatttctatgcgttcattagcctcagggaggttgatttttacctcctagaggtgaattttaaagacttcctttttggatgagaaagagaaggctggtagagaaggaggagcagaagcaccatgaaatcaggtgggtgatggtttcctttcctggtgcttttaaccagttctcccagagtggagataaacatgaagttaatatggggaatgttgatcttcctaaatgcagctccaaatgatagacccaggacaggtttccaaacagctgttattcagattagaggcaaggacttgatgtattgctcccattagaaagtgtcctaatggaaagggcctgcactttctcctggccccatctgaattaaacaattggagtattttaaatcaagggtcataagtgtcaacaagatggagagctttgcctctcgattaaaagaggcttataagttacttaggaagttcctgccgacacagattgcacgtggctcctgtgaaccgtggttatacccaggctaagtccagccgttgtcctaaggagggagcaggccacctcagacagaaaatgcagctggagaatttaagtctcacatgccaagatcctgctaaccagagggtttgggggaggtaggacctttcatgtttctctgccaacttgtccccaaggtagggaccacaatcctggcaggccgggatggggaccaaagtggcacttgcctttcataacatgtttgtgcttgtttccgtatcagtaatgtcttagctccttatcaggttaattacccaccccttctttccaggctccgagtagaagtcatgctccaagaccaggcgctggccttgaacgtgatgcctcctcctggtttgtaccttgtttgagatcatctcaggcacagagcactggaacacggggagccacgtgatcccaggtgcaggctgagccaagcatgatccctggggtgtctttttctcccctgggactgacattaaaggtgcaggagccaatcaggatcataacagaaggtagaagatttccccagattgagaggagaggagagaaagagcagggcaagggggtggtgaggagcgagagagcagagcccgaacagcagtagcgagggcaatgcatctggagctacaaggacagacgtctctaggtagatgcccttatggcagcgcttctggagagagaagaaaatcccagtaatattaacagggctacaacaaatgaaaattggaaaataaacagatggaacatgcctcatagtttagcttttatcatcaataattctaaatctgcaagtgaatatggctaactgtagttcaaaccatctgcctattactgcctctcacttgaagagactgtgttgcatcccactctccaccaagactgagaggaagggagggagggagagggagagagaataattattctcagctgttctgtcaaaacagacacgtgctccgcgcccagcgtaaaggtcaactgcagatacaccatctatctctggagagggcagccagcagtcccacgctgctctcctgggcttgtggggaccccttctggctgcccttctgagttcaaatgtaagcgtctaacaggcaggctctgttgtttatttcggggctgagattcagcagtttcttatctatatgggggaaattaatgcaggtacatgtatggtgtgtcccaacctactctgggccatgtggagtcccctctgtgcctttcaagtcttctggaggctcatctggggtccagaacagtgctgtgagagatgaaaggacacgagtgctgtcccagcgcagagagctcagaatctggggaagcctggctctccaagacagggaccactgatgctgagtgagcaccaacccaaattaggcctggtcttcaccaccctcttttggaaaatgaacattttattcagaaggcaatatggtaagaaccttgaggaaataagtgtaaattgtaaatcagccacaaactcagttttagcctaccttgccttgcgtattccctcttgcaagactaaccagagaaacacagaatcaagcctttatcatttggtaaattgtttcatcaagaatactggcccaagcatggtggctcacaactgtaataccactgctttgggaggctgaggcgggaggatcgcttgagcctgggagtttgaggccagcctaggcaagaccacatctctacaaaaatttttaaaattagaaaaaaaagaaagaataccatatctgaggtgcagatgagtgtgcaagtaattctttttgttgttgttttaacatgacaacagctggcttttttatggagcttccctgaacattaaaaaaaagtaactaaggccgggcgcagtggctcacacctataatcccagcactttgggagactgaggtgggtggatcacctgaggtcaggagttcaagaccagcctgaccaacatggtgaaaccctgtctctactaaaaatacaaaaattagccaggtatggtgacgggcacctgtaatcccagctacttgggaggctgaggcaggagaatcgcttgaacccaggaggcagaggttgcactgagccaagatcgcaccattgtactccagcctaggtgatggagcaagactctgtctcaaaaaaataaaaataaagaaaaagtaactaagacataaaaaccaacccaaaataagatggggcacctgaaaagtgtatgtgtacacatgtgtgtgtgcatgtacctcatatgggcaatgcatgtgtggacacaaataccaaaaatattccaaagacttaattttttaggtgttgactactgtttgttcatagcccaatggtgttaacaagcagtagattgttagtgacaatcacactctctccagcacttacagcagaaggcttgatttaatcgaagagctgtcatttattattctgttgtgcaattccatgggggtagctaactgatcaagctcgggctacggggagcagagggcttttttttgttgttgttatgtctaaatcctcaatacaaattacagtatttctggactcccagtgggacccattagagcctgtggggcattaacgatcattaatagtgctgtcaaaaaggaggggggtagggagagaaggaaagaaagggagggaagtgaagaaagggagggtgcagaatagtagccagggagaagtgtggctttttttcagaaatggaaaattaatacatctgctttgttcacagtgccgagcatttgatgtttattaacaggcatcttaattttgcagattagtaccagtcgggttcttacttccgcatattgaaatccttccattgcctcagatccttcttctcttttcctcatccttcctccgccttcccaaaatctttctctccccagtagtcagtcctgaatctccaactccaacaatgaagacagaaagggactgagaaaatatgagtggggagagtgtcttcattcagaacagagtgtgtgcgcgtacatacatacaccacggttacagccataattggcaatcttgcctgtgatatcccattaactgtggttccttgtaagcatttaactgtatagttagtaatcaggtagaaatgttttaatcacttactaactagcatgcttatcagtgtgatggagaaagggcaaggtattaattagttaggataacatgctaatgtttgcattgtaacacttctgctatttaaagcaaggaagaccctgagtttgagtcttattcagaactgaagcctttttctagaatttttgttctctccaaattccatatctatgctaagctgacttgccttttgcctccctatggttgcatacttttctcctttcattatatttttcctttcagtctcggactcttgagatctagtcttctacatccatgacattctcaaaccacagaaaggaattttcccacaataataataggtgtgcattacactttctttcttcgcagcaataagtgccattacttcattcaagtgttgagtacctgtgatgtgctgggcactgtgcttgacacagggaatacagcagagggaagaaagaaccaaggcaccattcctgccctcatggagcttctgctatggtgggagagagacttgggaatcccataagtccatttagaatcacagccatggtgtatgggagaggcattgggactatgagagattataaggtattctgacttgggaggaaggttgggaaagtaccctacggaaggtacagttgagcagatagaaaagaaaaatagattgctgattactttgttccaggaaccatgttaagtatttttccatggattatttcatttaatccttataacagttctagaatatagggaggattctttagtttacagattaaactaaggtttaaaagagaatgagctgctgcctgtctggcccacggtataagcctactgcatagctcattgatgaatgaaccccaggtatggagaatttgacccttggatagtaactcttccatcttctctttttcgtgtcttttgacatttttgagcatagataaaccaggctgaccaatgcagccattttactctcatcaaggactcagaatggtgtgggtactgtgcacttgtttgagacaatgcccttccttgctgatagcttcccgaattgagcaaagcagatacaaaaaaagtgagcaagactctcagcctacaatctctagtgtggaagaaacaccctatttctttgctttcttacatcaacttcattttctacttgaaactgtaccccctaaagggaccttgcacttaagtcgttcccagtgcatcctacatccctagagttgtgtctgtgttctgtgtctttttgccaagggatgttgaaggctggaagtcctctaggtcttaggtcccccagatcactgtgggaagaccccacatccccatccctgtgagccaccaggagcctggtgtggccatttctcctggggccttgcttcctcctgtgagccattccagaatagggtgtggggccctggtgctctgacagccacagcttcctctgcttctccattctgggtgaatcttttccttagcgaagcccttccccatatcttaggcactacaattctttacttaagctctcttaaactttatctttctcattccattagattttcatggccattgaacttagcaactgaagaaaactagtttccctttcctatagggcagagagagctttagtaaccaaatgttcctaggaggagtggggaaacatttttattttcattccagtaacacagtggttctcaaagagtggcccaggtacccaagggggatccccaagaccctgtcaggagttctccaaggccaaaactattttcccaataataagacattatttgcctttctcacttactatcattctctcacaaatacatggtggggtttgccagaggctacatgacatgtgatttaaaatattgaatgcaaaagcaaatatgagaatccagacatcttctataccagacattaaagaaaattgaaaaaaatgtaaaactcactaatttttttgttttgaaaaagttatttttataaaaatgtatttaacaggtaataggtttattgttatttttaaatgaataaacattttacagttttctcagttttaatttatttatttttatttatttatttatttatttttgttgagacggaatcttgctctgtcacccaggctggagtgcgatggcgcgatcttggctcactgcaacctccacctcccgggttcaagtgattgtcctgcctcagcctcctgagtagttgggattacaggcacccaccaccatgcccggctaatttttgtattttttgtagagacgaggtttcgccatgttggtcaggctagtctggaactcctgaccttagtttatctgcccgcctcagcctcccaaagtgctgggattacaggcgtgaaccactgcgctcggcctttaatttttaattagcatagcaaaagccttttggaagttctcaaaaaaaaatttaagagtataaaggggtcctgaggtcaaagcatttgcaaactgccacagcagagcaaaggaagaaaagaaaaaccaaacatcagatttccagacgaaatccaccatgccacaccggcaatttccaaatgcggaaactggattgtgtcatccagtgagagaaactgttacttggatactttggccctacctctcttattttttttttctcaaatttgaagagatcataataaaacaacctcctaaatctaggtaatcacacatcccagtttccctgggacagccccaacttctatatgccctttgtcctgtcataattttttatttttatttttttcattttaaactttttttcattttctttttttttttttttttttttttttttttattgagacagagtctcactctgttgtccaggctggagtgcagtggcacgatctgggctcactgcaatctctgcctcccaggttcaagcgattctcctgcctcagcctcccaaatagctgggattacaagcatgcgccaccatgctcagctaatttttgtatttttaatagagaccaggtttcaccacgttggccaggctggtcttgaactcctgacctcaagtgatccgccttgccttggtctcccaaagtgctgggattacaggcatgaaccatcacatccggcctgtcctgtcataatttttaagtgttcccactttcactcttcaaagtgtcctggtttgattgataaattaaaggtcagcctacctgaaccccacccaacttcatgagcttataaatgacaaagtaaatacaaaatttctatagtccagagagtcaagaaagcatcccatttggattgactggctgggatgtggcagagagcatgcatttatttgtctgtgaccttttcctgtttcagctgtgaatatgggtccccacgttgatctcagctagggagctgggtattaaccatcaaggcagtggtgaaccgggtgggcctcccacacaaaaagctcactggcaactagcaaatccagatggcgcacatatccatgtgatattagccacatagaggcctttgcggggctttttttggacattgctaagcctgctgagtctaagatttcaaatgctgttttgagctacttgatttagaggtgaagccagaccacttggagggaagtgtgaaattctttggagttcttcaactcacttgtgactctataaaaattacccgggggccagaagcaaggaaggaggtaacgcttcaagtggcccttctgcctccacagcacttttcagattagggagtgacaggggctgtggaaccgtttttccctcccgctcctcagtaggaaaacatcgaaacatccatactgtcagctgacatgatttggggtgagctttaaaggactaaaggactccccccagaaggctgaaatccttgttaagcaaggaactttcatctcaggttctaggctcaggagcatggaaattggaattctttttaattgaccatatggttagttttgcagctttgtgaagctataaatctttggtggagttgtaacccagcagaagtgtcaccagaggaaatttttttttaactttttcctcttgtttcttcccaaaactcacttaaagaaaaaaaaaaaaccatgcagcttttgatatatacacactggtgagtgaagtgtgggggggcagtaggtcttggacaagtgagcgtggcagggatctgtcaggcagatccagcagttccagccccattctgagagctcgcaatttagcttttgctggtgccagcaattataaaaggggcctactcagctttaagcactcaagtgttgatggacaaagtgctagtttaacagatctgcgtaatggggaacaggtggataaatacaggattagggagccctttacagtaacagccttattatcacatgttatgtggggtttttgccttcatttgacaacttgggttgtgtaaaaaaattttaagtaacacaacatagaggaaacccttcataacaaagcactgaaacaattaatcaagatttatgaaacctctgggtagtagtggtgtatcaaccaaagtggctatttctgatcagacccacagcctcctaaatgaataaatggagagcacagcaccagaagccacagcctccataagtggtacaattgttttccataattgaagatagcaaaagcctgtgtacgatcaaagaccattccattaggagagtgaggatgtaataaggggacagatttgagtctgcccagcctggaaggcatataatctatccccctgtctccaccacagcaaaccccactggtgaagcttactccatctcaaatggtggctgtaatccaccttttgcccttaggaaattgtattagtccagacctaacccccttattaagaggaagcacttttgccatagaaatcatctacttttctgtttccttttttttttttttttgagatggagtcactgttgctcaggctggagtgtagtggtgcaatctcggctcactgcaacctctgctcctggattcaagtgattcgcatgtctcagcctcccaggtagctggaattacaggtgtgcgccaccatgcccagctaatttttgtatttttagtagaaatgaggtttcaccatgttgcccaggctggtctcgaactcctgacctcaggtgatttgcccaccttggcctcccaaagtgctgggattataggtgtgagccactgtgcctggcccctttcttttaaatcaccataggatttattaaatgagcactgtatagatttgttttacaatttttaacctttatgtaaataatgtcctctcttttacccctttaaaagctgtttcttggctacataatatgttttggctgtttatctatatgagatagagctctagtttattttaactgctgtatattattttattatgtgaataaaccatactttattaatcctcctattggatatttagattgtttttcatttttaatataatgacgaagtccacagtcaaccattgtttctttatgccaaggattaggtttgctgggtgtgttagtctgttttgcattgctataaaggaatacctgagactgggtactatctaaagaaaagaggtttattcggcttatggttctactggctgtacaagcatggcaccagcatatgcttggcttctggtgaggcctcaggcagcttccaatcatggaagaaagcaaagagggagccaatgtatcacaggggaagagagggagcaaaagagatgccaggttctttggaacagccagctcctgtgtgaactaagagcgagaactcattcatcaccaagggaaagccattcatgagagttccgtccctatgacccagcacctcccactaggccccgcctccaacactggggatcacatttcaacatgagatttggaggggacagaacatccaaagcgtatcatggggtcataaggtgtgagcatcttcaccccaactgcttattgccagttgctctgcggtggttgaattcatgcgtgtgcctgggaagtgtctgagagttccctttcaccatatcttgctgaacattgactgtcaacagacattttaatattctcctgtgtgataaatataaaataccatctcactattccgatcatttggattttcccaattactagtgaaattgagcatctttttacacatttataggctattcaacataatatcctttgtccatatttttattgagttgtttatcttttttgtatttacctgtaaagctctttatatactctggatactaattttttttggttgtatgttttgtaaccattcattatttccttgattccctttattaagtaacagaagatataaccaaataggttggaagctatagcatatagagtcatgcaggtgatgctcaggagttaagagtctctcctgcaggcagtggggagccgttgagggttattaaaatgaggaataacatgatcagatttgctatagaaagaaaaggaaagcagcagaacagaggaggatggattgcagagaggagaggctagacggtggtgccaattaagaggcttttgcaagaatccaggagagaaataatgaggacctgaacctaaaccatgacagtgactcctaggaggatttccaaggatttccgggaactatttgagaatgggatgggcaatgctagtgagaattcagtggagcattttaatcagccctttcctattgattcacagagttcctttcccatcttgcctcggtgaggattgtttccatcatcccttggccactcaagtctacttaccgggttagagacttgttgggtctatgatgtccagttagatttcccttcaacgagacccagggggacattctgccagccattgacagatcttaattctccctttggctctcacttgttcccttcatgccaccttgtttgcctctccctgactctccctctctctctcttttctctttttttttaaattttatttcccatttttaaatcatgcacagtataatacaataagcattaaatcatgcaaattggtctaggttacattttgaaaaatgttaagaggaaactgttaagagaccagtttctgacaggcaatgcattttaaagttgagggatttgaaatatttcagcagtggacctaaaacagcattataaattagttcaacttatcagccctaaacagaattattcatcttccaaaagggtatttcatggccgctgggcccaaacgatcgttcaccttcatttctgccctgctctaagggtaggtctcactttactgaattctcctgattcattactgtgtgttactttatgaattttttatcagcattttaatagctctttcagatgattgaatgtaactgattcttgtagcagaacactgattgaacagagagacagtaatgtatgtcgtaggggttagcttcaagccaagcaacagagttttttacctataaagatgtgctttttctcccctcactaagagtctctgcagatagaagctgcccccctcctccttccacacacccgcaccttacccaccaggatttaggcaggaatctgccattttcagtttccggcatggtactgccagcaaagagagggaaaaatcagcccaagcctgaagcaccctctttttgctcatcaaaagtatgaaatgattaagatttcggaggttcttgggataagagaaagacattagactacctcagaccagcaggaggatggtctgtgggaagagcattggagtctgagccaagcatgaatctcagctgtcccttccttgctgtatcaccttgggttcttcgtctcattgtcctgagctttttcactttcctgtagatcagaataacccacctttcctggttattgtgaggattaaatgagaaattgtattagaaactccaggcacatcagaggcccctcaggaaatgtttgctacatatgaataacgtacacgaaagcacttgtgtggcactgtacaaatataacttattaatataagccacagtgatgcttgaccaagaaaagactttttataatactgtatgctaggttgaaccatatgagattctattttaatagacccaaaatggcaacttcatatggttcaacccaatattttacattgtttgatcatctgtttcctggttacaatgaaaaaaaaatgtgagggatttgtgtttgggtagtgggggaattatatagctataaggaatattagagataattaggtgcaattttctctcctgatgagaaacccaaggtccagaccacactggtagtaagaagtagagatatgagaacacactcagttcttcccaaatcccaggacttatgcagcatatcacacagccttcctgaataagggatttgttttcttataacaagtatataaccggacttgaaagagaatccagatcctcttcagccttgaccaggattctttcttctgtatatgctcacctgtgtacagcacccaacactggggaggttctcaagagggtttcttagacaactgattgacttcaaatggcaactagagagaaatcaaaatgagttgtagacattggtacatgggtttggtggtatcagataagtgaactgacacctgaatcttagctgcaaatcccagccatcatttgattcttggtgtgtcttctacctcaaaatgatacaaattggagttgacatgagtttttagggaatctacagaaccaactagagttcagtgttttggggcaaattgtatatacacatatatacaaattgcatatacacatatatacaaattgcatatacacatatatacaaattgcatatataatatatattataattaaataaaatatatataatgtattattacatataaattatacatgtataatttgcccagaaacaatttgtgtccagttaatgatagaaattgttcacttaatatacacatacatagtttgcatatgtatacatatgaatacacacacacacgatttgtgtccagttaatgatagaaattgctcacttaatcatttgtatgtatacatatatacatacataatttgtatatacccacacacacatacatgatttgtatccagttacattaatgatggaaattgctcacttaagctctgaaagtcatcaaccaatccagaaaaatacataaatggaagaatgggctggcaagaaatgagtggaagtgaaatgtcttatttggcaaatgaaaatatagccatttgggcagatacttactcatgaaatgctgataaaatacttgaatcaccaatatccttgtttgcttccctgtttatgtcaacatcttaatgtgaaatataattacaatgaacattcagaaacagaatggcaaagcctggctaaatttattctaatgtccattcttatgctgaaagctaggtctccaaatgtacttctaaaattattttttacaatatgtactttaataggattgcaggattgaaatatagcttttgtggggcaatcaggacgcaggggagaagttatatgaaagttgggtaaagattgggggattttatggctgattttcatgatcctgctaaatcatgtggtcacagtgggatgaatgaagaatgaacactagaaaaacgtgtctttttgggctgggtgcggtggctcatgcctgtaatcccagcactttgggagaccaaggcgggcggatcacgaggtcaggagatcaagaccatcctggctaacacggtgaaaccccgtctctactaaaaaaatacaaaaaattagccaggcgtggtggcgggtgcctgtagtcccagctacttgggaggctaaggcaggagaatggcgtgaaccaggagccggagcttgcagtgagccgagatcgcgccactgcactccagcctgggcgacagagtgagactccgtctcaaaaaaaaaaaaaaaatgtgtcgttttgtttgtttgtttgagacagagtctcactccatgacccaggctggagtacagtgatgctatctcagttcactgcaacttccgcctcccggattcaagcgattcttgtgcctcagcctcctgagtagctggcattacaggtgcacaccaccacacccagctaatttttgcatttttagtagagacggggttttaccatgttggccaggctggtcttgaactcttggcctcaagtgatctgcccacctcagcttcccaaagtgccgggattacaggcatgagccaccacaccccgccaataatatgtacctcttttcacccatgtagttactgcttatggacttttctccattaaaaaaaaatcaaaacactaaaagcctttatttacactgtttgctctttcttttacatctactctgtatcttcttcctaattaagaatagttgggaacctccagggtcaaatagaaatggtggcatcaacacggtcatagagaactctgatgttcaaaggacatggccatggaaaatcaaagggaagactaataaagttaaaggaaagtttcaggtttgttgggcccaaggactcctgaaaggataggattaatgtgttttttgagccaaagttctgcccttgaaagggaaatctcctctgagctttgagtagctggtgctgcatcctttaaaaatgtattggatggaattaatagtgagcgttgccacatcccttcttcccagcccaaccaagaaccagggaaccagtcattctgtcacaaaatgaatagaagttatatccaaatgccaataaaacccagttagaatttaatgtaggacataactagagtgttaaatatgacaaactaactttgagataagtctgagagctcaagttccaacagaaacaaaaccttttatggacaaatagcttcgtatctcatatgctactcccaacagctcatttagatgaataatacagattctgcattggatctgtattggatggaggaaattgagacatagagcagttgtgacttgcctgaggacacacaaagttagtgacactggcagggttctaccatatcactttacttaatatgagcagcttctacttgattgggtgttctgtcagctggccatgaggaggggcaaaggaagccattcaaggaatctgaattgccaatgaggctgttagctgagtctactttttgaaataacttcatcatgatataatttatgtatcataaagttgacccatttttaagtgtgcaattcaattagttctttatatattataaatacaaatcctttatcagatatgtgatttccagatgttttctttcagtctatggcttgtcttttcattttcttaatggtgccttctgaagcatgaaagttttctatttcaatgaggtcctctttatctctttttttatggttcatgcttttgctgttatgtccaaattcaaaggaatgttttttaaaaataagtattatcaagtcttgttctctctctttctctctgacacacatgcatacacacacacatgagcaagcttaaagtcctgcatgaccccagatttcatctggaataaaacccaagtctgttgctgtggcccacaaggtcttccctgatctggcacctgtgcctggtctctcctcagccacatgttccagcctcactggcctcatttttttcctggaaaacgctaaatatgttcctttctctgggcctctgcttttgctgttttctctgcctagaatgttgtctccagcaattcttgtagctggcttcctcctttcatccaggtcccacctttagatatcacgtgcatcatgatcacgccttagattattcaggagatatttattctactaaaagagccttcttccagccaataaaaaatacccttttaaaaatttccttcgcagtactttctgagattattttgactttttaaaaatttacatgtgagcaccgtggagaccttgtctgggtgctcactgcccctttcttggcaccttgagcagtgcctggtacaaatgagcggctgagtaagtatttgtggaatgctcaatgaatgttaaactgagaagcagttcagagatcagagtcactgtttaaacaaatcaggatcttcaacaattctttcctaatgagcctttctttgtcaaactcatttcattccaatcactcctgtgtttcccccacgcttggagaaacaatctttctggtgcttcctttcattttttttgcagatgtccttgcattggttcatattcttttcttccttggaagtttcccaccccaccccgaattaggaagttcctcagggacagaatccatgtcaactactttatcttctgtctctccatgcctagcaaatgctaggtgtttggtcactgagtagatgaatgaatgtacatccctgaccttcacccttgttccttgagtggagaaaaaagaccccaggctgtgtgtactcttcatttctggaatgagggttcttgtacatcccatcatcagctctcctgggcttttattctgaaggctagtggaggcacaactgcaaaagactttgcagatacgacgtgtgaaatgccaagaggaagaaaaattgaaagcaggagttgcatcttgccatgtgatgtgaatacctttctggcactatgacagtctcctcatggtgggcagtgggataccatgtgagaccaagcaagggcccaagtcacctgcagctctgagatgcctgcagaattctgtggaaaacttcccaaatgcacttagaccccagggttttgatgatgttgatggttctctgttcagttttttagtttctgtcaaaatgtattatctaaactctttactcagtcctacctacaaaatacactttcatatttcttactaatcactttactactgaagtaaattttactagttcacttttccagtggactttgattaggacatgagaagtatttgttggcacctataggcagacttagatgcaatgttttactttgatgccaaaagtgggggaaggccttagaccaatagcatggcgtttgttattttagtttaccattctccctccaaacggcccatttcactgagactggggctatcttgctgcagcttggagtcaaacacacatggatgtgactctgcctttgcctctcagagcctcagtttcctcatctataaaatgaggctaatagtacccagctgatagggctattgagaggatcacatgaaataacatatcagatgttcttattacagtggttaggtacagagtaaatacagaataaggggtagctttattatgaggatttatatgattattagcattattattgctatggctgcaaccagtactaccaagaagagaaatgccactcaagcgaggacaactcagtaggtgtgacgtttaaaccaacagagaaatcagtgcatttttacttatttatacctttacctggttccataaaagttttatccctgtttctaaaaagaatgcatcaaataaattgaagtgaacacagaaagaaaaaatagcaactaagaaaaaaacacagatatgggaaactttttttataatttcagctttcattttggattcagggggtatatgtgtaggtttgttacttgggtatattttgtgatgctgagatttgaggcatgaatgatcccatcaccagatactgagcagagtacccagtaggtatttctttagctcttgccttcttccctctctccactcctctagtagtccccactgtctgttgttgccacgttttgtccatgtatacccaatatttagcttccacttacaagggaaaatatacagtatttgtttttctgttcctgtattaatttggttaggctaatggcctctagctgtatccatattgctgcaaaggacatgattttgttcttttgtatggctgcttagtattccatgatgtatatgtaccacattttctttatccagtccactgttgatgggcacctaggttgcttctgtgtctttgctattgtgaatagtgttgcagtgaacacatttgtgcatgtgtctttttggtagaacagtttattttcctttgagcgtatgcccagtaatgagattactggatcaaatggcagttctaagttctctgaaaaatctccagattgcttttgctgcagaaaacttaaagatcatgtaattgccacaactgagcttcagattttaaactgagattcctggcagccaaggtcaacttcactacataattaatttaagaatgagaccgccatttcttcaggattcaaagctgcttctaaaactaatttccaagataactttcttacctgggactttatgcagtgaacagtattccaacaacatgttctcctcaaatgcaataacagattttttatggctgcttctggtagcacctttttgataatagcaaagcagcatggcattaaaatacaatccggtgacagcagttctgtgtggggctaaggtaatatggccctagtgtgtagctgtgaggtggtcagacttgatccagggatagaatgtagagtgttttgaagaatggttgaactgcttgtccttcaaataatcttttgtaaatattgcttttctcagcttgccttttgataggagttgaatagcagacagtttgagattgtattctctgacaaaagcctggtgtgtttgtattctctgttcctggtccagggcagagccttatgccttagaaatcagaagtgcaagtggtaaagttgacatcttactgtaaaaattggactcctgcctgaacagaaggccattctccctctccctaggtggagctgcaggaatacttgcaaacaaatctagactcctcttcaggaatcagtttgggggcgtctaggggtctagtgtggcattcagacttgctgccctgggccttattcagtaggtctaaactgcagtgcagcgcactctggttaggggtagattcagaaggtaagatggcgcaaggacaagctctagcctatagctggaaagtacaacgcaccgtgccccacagcaccctttgagagacacctgcccagcaggaaggaggctgcactggaaacatcacctgagcactccaggcgaaaaccggtgaatcagctctagagggtggcttagatctttcccgcctgggtttctcactgccctgccccaagcagtagaaactgtaattccttcacacaagtctaagcaacatgatttcttcataaacctggcagatcaactggctataaaattttctcttaagaaattaaacaaattaacctgttcagtgaagttattcgaacaaaatggttacatttggaggcaacgctactattttaggttgctgtagttactgttgagtcattctttctgaccatggatgccaagaccatttatctattgacactagtttatgtcaaggtctataaggaagaacttgtgttaggtagagagaaaataataaagcagaaaggaaccatgcagatgatccagtacaatcttcacattttccagaggcctggaagtatttcctcaaagcctgggggaagtcctgactctcccacttacaatggtcattattccatgtgaagactgtttccaccatatagttggtcaggtatgtgtattagggagagataaaataataaaatgaaggtggctgttggattccttagaatccaggggcctcatccacattgataaatatttatcttgttctaattaggacctacatgcctacattaactggtggaagagctctcagttgcattaagctccctggcagaaagaaatggcctggaggctgcttcctctcaagtgagaaagggtcttccaggactgttcgaacaaaaggcatcagggaagtacctcttgagtctgtcctgtgaaagtcaacccagtttcttggctttccaggcagcctcacattgccttgactattactccagttcattaaatgttaatgggttatcaatataggaagagtaatcccctgaagtccctttaatatgttttattcttcctctcaaataaatgattgattaacatcaataggaattgttcaatatatgctgtctgcaagactccttgctccttgaggctttctcctgtggtttatagcccagtgcagacgcctcgatgagatcttaaatagagagagtggtaaaagtttatgtcagctcgtcagtgaaatggaggtggggaaggatctaataagtgcactggcttgaggatgatggcattttcataaatcacactgttcttttccctcttggtcggtcctgcttgtagaatcatagtatcttagagatggaaagggccttgaggttattttttccagcttcccattcttcaaggaattccttctatagctttcctgacagacagtcggatagcacctgcctgtacctccagggatgggccttaccttcctcctgaggcacgccttcagctcctctgcagttctgctagtggaagattttccccattccatcagttgtcatagttcctattcctttttctcacgactcaggttagagttgtaatcttccatttatttgattgcctctcctaaaagactgtaagctccaggaggccagaggccctttccttgttagctggccattccatatcatgccttgcccattgaagggactcaatgtatatttgttgaatgaatgaatgaatgaatgaatgaatgcacttaagtttagaaattccagaaagaactaggaagatattacataacatgaaaatggaaatagagtattttttcccagataccagctgatgtgctcaagatgactttagggtgaatatggaggaaggagtgaggggaagtacccaggaaagagtgacgggttatgactgagcaacattcagagcatgggaaaaacaaaaggatcttgactttttaatgcagcctggtaaatatcattgagatttggcaggaccaaaactgagcattggaaaagggatggaaaagtcttccctatgaggaaaggagcccacttgtggagaagatgaacactcgcatggaagcccacagaagtgagagaggtggcctggaggagggcactcgagtgaggagatgggcacctccagccttgggtcagtcacaaaggaaggacagaggcaggaaacaggagcattctggacagggggccctggccgctgctcacagcagctcatcttctggcgggagagggttagctcctgcccagtgtcctcacgtacgagagtggtgagtttctaatgcatcacctctcaccatgcaccccaagacagctgctcttctgaatcctacctagagaaaaaaaaataacccacacaattctcgctgtctctcaacctcccacatctaatgagtcacccagttttgtcacttcatccttgggatgtctcttgacatgctttttcttcctttccactaatgtagctcagatcccaaattctctctgggaccatcacttgccatacgcagctgagtcacataaagaggttgcccttacacaacagatctctgctcactgttgcctaagacaccgcacgctctgctgacatcgtttattcttcctgaagagtcctttagttcatcacctggtgcttgctggccaggttctataccatcttcaagatcctgcttctgaggccgtgtgcggtggcttacacctgtaatcccagcactttgggaggccaaggcgggcagatcatttgaggccaggagttggagaccagcctggccaacacggtgaaaccccatctctactaaaaatacataaattagccaggcgtggtggcacatgcctgtaatcccagctactctggaggctgagacacgagattcacttgtctgggaggcagagattgcagggagccgagatcgtgccactgcactccagcctgggtgacagcaagactctgtgtcaaaaaaataaaaaatcctgcttctgttcttctcttcatgactgcccgtccaactccctctgccccctggcctgtgattgtgttcccatctgtaccttcttacacttacctccatctgccttatgtgtgcctttgaagttcctgcccttgcctcctctctcccgacaccctcaccagcctctgaatctctgaatggtcttagtcacacttgcttccagtcagccttacaccccagcattgtgttttacatacaggctgcactcactgaatgtttattgacttgaatgggatgtttcttcctaagacatcaattccatgtcttatgatttttcatgcttttcaaaatattttcacagagtctgtttcagatcattcttggtgctggtatcacacaagctgagctgccttcctggggttcaccctttgctctcctttgctcatctccgttgttctggtctcctccagaaatctgctgaggtgacatcgtctccagtgacctctgccaatttgttccaacatgggaatgacatgctgatttaaaacagttgaagcatactccagaatgactagaaatggtctcgtgtttgaagtttctgctcattggtggaagttaaaattccagtttctccagcaacatttggttaaatgtccctatccagcattggaactgctcactgatctctttttttgggggggttgaacccctgcccatcttctcagtatttcaagggcatagtcacttggctgtaataactgctcaaactatttactcaccagttttaagtatagatcagcctggtgtttatgtgataaaattctagaaacttcttcctttgcatctttctctacctgtgcccaccaagaaaaggagccgtacttcaccccatagccgtagatcaaatgaaaagaaataaatttctcacttgtctctaccctatgctaccttttcctttgttaaaaagggagataaaagagaaaagaaaacactggtctacataaatagcactaaatataaacagtggaaatgggcttctgggctttgaactctacagggaagttgttatggcaacctcaagttgaattcactgggggggaagtgtcagtattaatgagataagatcgaacttgtgactccaatggtaactgtattctccaaggtttttcttcttactgagacaagaagcaaagcctttattttatcagtgacatctagatttagaattgggagacaaattgtgtgggcattggggcctggagtttagtttccaggatgaggtttctatttctctgttgagaggaattagagccactcctaacacacctgctttagctattcttgttcaaagcctatagttgtaaatttagaggatgggtaacatagaccattaattccctaaagagacttgaagttcacttaaatttaaggattttttttttttttttttttttttttactggagtgttacacagatttttctatagggataaggtaataagatataattgatattgtaactgtccagtggaggttaagttcccaaaacagtgattgaccatgggtcaagattcccccaatgaagaagaaattctaaaatctgaagagagagagaaataaaaaaaaataataaaaaaaaaacccaggtaatggaaagccctggttgagggcgagaggaaagggttgcagagcacgctgagcaggtactgcctatggaagtactgactctgacttcagaggtggggagacagaggtaagagcatgaagtatgtaaatactcaaagtgtttatactgcattactttatcatggaagtaagtaatgtatgaaatttgcattatagaaattagactgagatgctaatcatttcttgttcctaaagctgaagacatctataaaataagtttctaattcggagaggtgagcaaggatccacaggttaagcagacttcaaaaatataccatctagtgccgggcacagtggcacacgcctctagtcccagctacttgggaggctgaggcaaaggatcacgtgagcccaggagatcgaggctgtagggtgctagttcagggctgttgtgcactatgattatgcctgcgaatagccactgcattctagtctgggcatcatagcaagatctcatcttaaaaaaaaaaaaggagtatgccctccatctagaaggggaacagtgagccccagggcacaaagagagggaacaaaaaagtaagggtgggcaaagcaaatgaaggaggataatagcaaccagaaaaacttcttcccaaatgttgtttatttgttgaaagagtaaactcattcataaactatggccatgtataaacaccactgtactaacccaaggagacataggagtgcctcagaacagcagttggttgactaatgccaaaaagggcctggagcctctcaaaaccccaccaccacaaacacatgaaagagctacttcttctgggcagacccttaaatggaaaagcctagaaaataccaacactgcaaactgaactactttgcaattctctccaaattctgtcttcaccatgctggaaaaatggaataaagaaccaaaatcaacgatagcagtgtagattgcatgtaataaagagctaaaaaatttatgtatttcatagcctacaaagccccttcataaataatctttgcaaagcaatcatgtgagctagacaggacagatagagtgactctcgttttacaaatggagaaagtgaggcttggagagccgaccagacctgctaaaactgtacagcttccaagggctaaacctggaacttgagcccaggctgaattctctgtattcagaccctctgctctttctatggcaaagtgcctcaagaaaccaggcaaatcgtacctataaaagaaatgtcaaatcacgcagaattcacataaaattacttgaaaaggctcctgcctttcatcccaggctgtccttcacgctgctggcatatcctgcaaatgtcatggcttcagtgcccagggttttgccagaaagaacatgctgccagcctgccgaatgaaggatgcgacttgagaagcagcagaatttggagaggaacaatggagttctccttctagggggtgggatcagtgaccatagttctcagggggcagtgatgaaacagggctttgtgtctattcaggaatagtatccagaagctcacttatttttgctttccaaataagtaaatatcagaaaggatagctgaggtcagtctagaaaattagaatttgcttgggggaaaaatatgttctggaaaagataaacagtagcttgcagtttcactgttggaacatttgttacaaggtcctggtattgatcttttatcacccaatttccactgggagccatgatgtattaccacactgggaagctctaatgcaagtgcgtgaatcaagggagattctagacaacatctgtagtgaggcagcatccatttgagggagggaagattgggaagggggtgttgctagctgcaaaattccaaggggagttttgcgttgtgctgtgtgcaaatgcatatccgtgctggggagtgttatgggtttatgaggagagtgattaaaattgtatcaaagaggcttatgaagcttatggttcaagttaactgtatgaagtaaacagcctttaacggcctcctgggagtgtgacagatagtctgtgggtgttacggcaacatggtactggtgaatgttctggccatcccaaactaatcaccatctgtgagcatgggtctctggggagcgtctggtggttggacaatcatggtagttagcatttttaatcagcttctgtgcggcacagatagaaaccttatgctcaagcctttctttttctgtctgtgtagaattacttatgatgatgatagcagagccgacaagggtttgggttgtgcctctgcaggatacattctgtggttctctgccctccctcttccccagcccccagcctgaccgtggaaattagcctggccactgcttatggtcactgcttttattacttctctttaccactagcaaaagggatgtcaggggaggggggatgtttctgggtttagtgggactgctgcctcgggtcaggatcttgagtttgagattcttctctctcctgctttcctctcctactgcttccttcatcaccaccacctctagctctgccccaacattcactcacccatcaggcaccaacttcttttttcttgttcttattatcgttgggaagcattacttgagggcatcgttggatgccctctaagggacccaggcaaaaggggaagtcaatggtaccatccctagaagtaggcaggcctcatggatgtttttgctgtgcaacagacttgagcagctgtgacagactgtaaggtctgcaaaactaaaagtatttgtgatacagccctttagagaaaaggttggctgactcctggcttagagtattccttattcttgagaaatatttgatctagcaaactgtactaagatgagacataaatatctaaatcagaatatacatttcattaggccagtatatgcacatttcatggtaggtaactaattcagtgggctgattaaaataatttattgtaacaaaagtatttggaactgcctgtaattaaaactaagatttattaaagaaacaaaagtcgccaggcctgcagacagctagatcctgtgcgtgagggttgtcttagtccattttatgttgctctaaaggaatacctgaggctgggtaatttttataaagaaaagaggtttatttgactcatggttctgcaggctttgcaagcatggtgccagcatctgctctgcttctggtgaggcctcaggaagcttttattcatggcagaaggtgaagagggagcaggcatgtcatatggtgagagacggagcaaaagaaagggcttgggggtggggttccaggctttaaataatcggctctcatgtgaactgatagaaggagagctgactcatcaccaagaggatggcaccaagccattcatgagggatccacccccatgaccccaacacctcccaccaggccccacctccaacactgaggaccacattttaccatgagatttggaggggacaaatatccaaaccatatcaaggatgaaaggagagggtgtcagttagcttttgttatataacaaacccccccaaaacttagcgactttaaacaactattttaagtagctcataattctgtgggtcaggcaggtgattgtacctctctgggccagctcagctgatctctgctggcttctgtcagtcatctgtggccagctggggttggctggtctagattgtttgacttacgtctggtgaataacaggctgattggtctggggatggtgctgggacttggctgggacagttcatctctgctccatgtggctcttacccttcagtaggctaacccaggcttcactgcatggcaatctcaggattccaaggagcagcaagagagcaggccccagtgaatatgcactttgcaagcttcagcttgtatcgcgttgctgatgagccactggccaatgcaagtcacaaaactggcccagagttaacgtgggaagtgaccccaaggatgtggatacagggaggcatgaccaaatcagaagccattacttcaacaatctctgcaaagaagagaggtttccttctcttcataatctctaccacctttcatggtgcctagaatttacattacagatttattcctttgggtcttaaagagtctgcagtcttcaagaggacccctgttatatgaaggtgtagttgttcaaccaaggcctacccagagcttagctgataactgagaacagggtcgataccagggtatcagacaccaagaaagaatatgaaagggaaggtgagaaggcactagaaaaaaatgaactattcctgcattcgcgtatccagctacccacaagaaacccctacgtggctgttcagggggcacagcaaatccatactgtctcagaccaaccccatcaccttgccttcttccttctctccaacatgatttttcattctcgcagcaaatacagtgcctcgtcttgaccagtgaagatggaaatgaggggaggtggaggtaaaggcctgcagaacaaaatggaagaaagggaatgacaggtaggaaagggtagaaaattattgctgagtctaagtattgagggttcaactcagtaattgattccatccaagtttaagacagtggacacattcctctgtttttttggttccttatcctttgcttccactcctgaaaggattataatcctcattcttgtagttgtggatggttatggccagagaaggccatagggacagtcatcaaggaaagcagaggcctctcactcaggagatgcctcagcattttactgtcttcaaagacaacagcccaagtgctggagcagccagaaaggaaccggcctgatttatttatttatttagagacttggtctcactctgtcacccaggctggagtgcagtagcatgaacacggctcacttgcagattcaatctcaagcaatcctcctgcctcagcctccctagtagctgggaccacaggcatggaccaccatgcccagctactttttaatttttttgtagaaacggtctcgctttgctgcccaggctggtctcaaactcctgggcacacgcgatcctcacacctgaccctcccggagtgatgggattataggcgtgaggcaccattcccagaccagcctgttttctaatgggtgtccacattaaatctgaactctgcctcaagttgtagctgctgctgagagaaccctggctctatgcttttctcacaaaagagctgttccagactgcccttagaatgttttctcccgtggcagaacagctgttttctgttcagctgtcccttacattgtagctctatgctggaactagctcgtgtttaatgctgtgttatgggtaaagccctcttgccttgtaggtgacactaataaaatcacagaagagatcaaacctagaatctctgccgatgcagacctcatagtcagacaaagagttggatgcttccattgctctcctagcttaggctggagctggaattctcacagcaaccagcagggagctggcaagtaatggctgctgtgtcctcctagaccagggccagcctttagtagcagctgagcgtgggagtggcaggcaagcttggcaccatgcagcagtgggcttccttgggtgctggaagtacagtcagggaacccttgttctgtccactctgcctacacaatggttgccttcagtctggagagtagtgaatggcaatgagtaatgagtaaagggggaccctcttcataatggcaggggctgggagccttctgggttgaatattttgtagcactcaaagagatggccaactaagaggtcgctctggtattgccttttctctgcctccacatcggcaggcttccagcaccccactattctggatctcaacattggacaagtgtactaatgttcaagcaggggcctgggtgagatggcctcatggtgccctgctggttgctgccttttgctgctcttttacaatccctgtactcaagggttgatttctgacgcctgggagggttggcactttgggaaagaccaatgagatttttacatttgagattttcagcatgtcaaacataggcaagacagaatatcggggagttattgggaatatgaatttgtttgtttgtttgtttgtttgtttgtttgtttgtttgtttgttttgagacagagtctcactctgtcgcccgggctggagtgcagtggcacaatctcagctcactgcaacctccgcctcccaggttcaagcgattctcctgcctcagcctcctgagaagctgagattacaggcatgtgccactatgcccagctaattctgtatttttagtagagaaggggtttcgccatgttggtcagcatgttcttgaactcctgacctcaggtgatccgcccacctcggcctcccaaagtgctgggattacaggcgtgagccactgtgcccagcctttttttgttttttaaataggcactaggagagcaatatctttacattttgttacctgtgaacactcagcacaggaccatataggtaatagtaatggtgattatggtgatggcagtaatgatgatgatgatttagtatgattcaccaacaggttataagacttcagaatgtcacgaactggtgaaaaaaaaatgtatatttttttgtaattgtaggaggcctgcatagagttgaattgctagctttttatattgccaagtaagaatttttttaaagtatgaataccataaactatcaccatctatttcataaaaaaaaaaaaaaaaagatgtaatgtactggttaagagttgtacactcaaagaaattctgatgatacctgggctagtaagctgtgtgaccttgggaaatttaagtaacttctctgcctcagttccctcattgtgaaatggggatgattataactgtaactaccttatgggattattggcagaattaagtgaattaatgaatgaaaggcactgagagcctggcacagagagcacttggtgcctcttatatttttattgttgtcactaataccaaagaacaagacatatataatattagaataagtaacaattctgcacatgaaaactgaaaattcactgcattgttgtgttgttttcttttttatttttatttatatttatttatatatttattttttgagacggagtctcactctgtcgcccaggctagagtgcagtggcgtgatctcggctcactgcaacctccgcctcccaggttcaagtgattctcctgcctcagcctcctgagtagctggaattacaggcacccgccaccccacccagctcagttttgtatttttagtagagacggggtttcaccaggttagccaggctggtctcaaactcctgacctcaggtgatccacccgcctcagcttcccaaagtgctgagattacaggcgtgagccactgcgcccagcctgttgtgttgttttcatcttacttggttataggccagtggtgatctgggagccactggtggaccacactggcttagttagtcttccttctttcctccaccaaaagacatgcagagcgttactgccttcccacccaataaagaggatggtaggtgagaaaataaagagctatactgtaagcagagcaactgggtttccaaggagggagtgtaaaacaaaggatctcagtgtgggagtgtctaaggttgaagctgtcccaaggcaataccttctacccctactctaaattaaaggagtcataactctttgtggttcctgtaaaagtagttaagaggccggcacggtggctcacccctgtaataccagcaatttgggaggccaaggtgggtggatcacttgaggtcaggagttcgaaaccagcctggccaacatggcgaaaccctgtctctactaaaaatataaaataattagccaggtaggcacaagaatcacttgaaccagggaggcagaggttgcagtgagccgagatggtgccactgcactccagtatgagtgacagagtgagactccatctcaaaaaattaaaaaataaaagtaattaagagtcaaagggcatcattacatagagacacaaaatgaaagtcagtattgtatgcgcctttgccctgttttagaccttcttaacatatgggagcccaagtagcccaaccatggtggaagagaagatttcatggcctttctcattggtcctcaccgtgaatatgcagagtaggcacacctctctgcagagaactcctctaagaaaccagattcaatgatctgatgatcccgcttctgctgatatgctagaagccaaggcttttttttttttttttttttttttttcagtagaagaatcaaaagtaggccaagcgcagtggctcacgcctgtaatcccaggactttgggaggctgaggcgggcggatcacctgaggtcgggagttcaagaccagcctgaccaacatggagaaacttcgtctctactaaaaatacaaaattagccgggcgagttggcgcatgcttgtaatcctagctacttgggaggctgaggcaggtgaatcgcttgaacccaggaggtggaggttgcggtgagctgagattgtgccattgcactccagcctgggcaacaagagtgaaactctgtctcaaagaaaaaagaaaaagaaaaatcaaaagtaataacaggaaggaatgtgttagcaactgtagagtattagatgtatggctgaccttccaaccagctagctctctggtccccagccccactccacaacacatcctcaggttcccagttcaaaactttaaggccgctgaaacccaggctccatgcacattcatcattttagccccactttcagacatttatatgttggtgctcatgccaagccaccttggaaaacaaggacaagtatatgttcccctccacctccttcccaccagtacccagcgtgaggtctgtacatagtagatcctccataaatctggtgtaaaacaaaataaaagcaggtgaccttctgtaaccaagatgtgtgtagctacatccatccactcccagtactacaacattggatttttgttgctgttaaatcaaaattttagtctttcagaattaattctctttgcttaaaattaattatgacaggttgtgttttttacacactgctgaaatgtgtaaagcagtttgggagaagagggcctcctttcctgagttgatttatgttatatatgcaaactctattaatgttaaaccatgcttttcaatgaaattaagactttccagcaagcagctctctccattttatttaaagatcctagtgactgatgcacattgtgcccctgttgctacgataggagcggaggatgttggatctgagagatctcatgcttaacccttaagtgagaagtagcgtgtggtgtgggaaggtaacacagctctctcctgtaagcagaaatcaagcggtggtctactgagagccattttattacttccagagaaccctgaaggtgaaatgaaggaggaaatgaaggcaggtgggaaattaaagaaagaggagcagaaatggaagtaagaaggacgtaaaaatttcagtatcttgagaaacctgactgccgaacaaaatgtttgggctgggaagatggagaatgcacggaggcctgcaagaacatgggacagccatgacatgtgggctttgttcttccaaagagataaatgaggccaggcatggtggctcacacctgtcatcccagcattttgggaggatcacttgaggccaggagtttgagactagcctgggaaatatagtgagaccccatttctacaaaaaattttaaaaactagccaggtgtgatggcgtgcacctatagtcccagctcctccagaggctgaggctggaggatcacttgagctcagggcatcaagtctgtaatgagtcatgattgcaccactgtacttcagcctgggtgacagagtgagaccctgtgtaagagagagagtccaggcgtggtggctcatgcctataatcccagcactttgagaggtcaaggcaggagaatcacctgaggtcaggagttcaagaccagcctggccaatatggtgaaaccccgtctctactaaaaatacaaaaattggtcgggtgtggtggcaggcggctgtctgccacctgctacttgggaggctgaggcaggagcatcgcttgaacccaggaggcagaggttgcagtgatccgagatggcactgctgcactctagcctgggcaacagagcaagactccgtctcaaaaaaagaaagagagagagagataaatgaaacatctgctccttaaagcagtaatagcatagtctttaatatcaggaggaagcgttatatgttttatttaaaggttgttgatttatgaactttgtacctgtctattaagagtctggttcttgcatggttaatgtgtgaagttttaaaatttgtgcttctcatgtttaaagcatgatacccagcaaggcttctgacaccagacctttcccatattccatttcatagagcatttcatagaaaatgtttcatagaacatgtcatagatatgttcttttcgtagaacagttatatattctttccttcatcaaacatggattgaacacctattgtgtgccaggtatagtgatgggttctggatgaacaaaacgggttttctttagttctttgtaagtctttgaccccatggaattaaccgcatagttaattccacaggcatccttggtaacatagccccctctggtaacgtagcagaccacagagtgacaggtggaggggaccgaatagtgagacagtcacctgggattctatgattccacgcccctgatgctttgggctgggggagttggctgctgtcatttgtgaggtagagtcgcaacctggtacagcactaagaatccatttccttcttctcagtgactcacttcccaccatctccaattgctctctggtcatagttactatgttgttgtttgccagcagaaacagccatgttgttgtttgccagtttggggctttctgtcaacctgaaagacttccttctctccagccagtttggtcttgcagattttgttgtgaggccaacaaccaggctgtgaactgcctaagcccagccagcccttctttgaaaagccctgtggaactaggtcatcaggttgttggatggttcttacacagactgtgctgtgctgcaacttttaatgtgcactgtctatggaataccaaacttgtttccaaactaaatagtttccaatgaggatttaatgggagtttttcatttgaaatggattgaaaacaagccatttcctactcccatttcaagcaaattttggtccaattattttcctttttttaacataaagttaaatggactattctgcccatccctgactgagctgaaccgtgatttctcttgattatgcttttacactgcgaatcgcgaggctccagagacataatgggcgtctgtgggagagtggcagcaatttttaaaatcctgccagtgcttgtcagcttccactctggtgtctgctgtgcgggaagaaagcaccccaccaaaagaaaaaaagtctgccaacaaaaccagcgctgcccgcctgttctgtgggggttggcacagggatgggctcctctctgcaaacctatgtagggcatattctcagccactgaggaagcccggtttccactcatccagccctactcctcccactgttttccagccattagctttttgtggtgttgaaggtttctttctcccttttttttccttgcctcaatttttcttggtttcacttagaccatagcctcagggaaaaggagctcttggcaccctgccttccacttggtcctttaccttcagcagcccagcaaaatggaaaataagtgtctcatagtccttcttgggtggtaggttatttgttgttgtgatattgttggtggaggtggtggtcattctcttggatttgcagaagtttacagaaaactcgggagaagaaaaggcttcttgctaccatcctctctctttgggaagggcagctacccccctagcagatatgtggggagcctactgggcaatgccttgtaatgggaacagcctctttgctctcttacccagcagtgccaagaatttcactaggcccactgaagaagaaacacccttcaccccagctaccattgtagctgccctaccattgtgtgcagcccgggggaagcacacagtcgtctctgggtttctggtgaaagtccattgtgcctgctcagggctccttggtgcaggagcagtcaagccttcctggaggttgaagatcacgtgctgtgtttggtggctccccacttgggtttccatcgattcatggtattggtttgggaggtgctcacatcctcctgcaagtaccctgtagtgaggcttactctgaggatgcagctacatctcaaaacatgactccacctcttcctgcaaaatcctgactggtacaactgccagcacatccctttgaccttgagaagggtaaagcacagaggtggtaggtgacttcattagcatgacagaacgtcagagttgattagcactcaggaaaggttgtctaatgccagcctctgcctttgtaaatgtcttcagcatcaccagggaggggttgatctggtctctgcctgaacttgtgctggaaaacagttctgagcaggcaccccatggaaacctctaattcatgcaaaagtccccccctatgaagtgaagtctgtttctgttgctttttcccactggtgctaccccttcctgagtccacgaaatctaaatccagtcccctttctacctcttatccctccaggcatttgaaagcaggtacttattcctagctaagctttccttctctaggcctgctttcaggtctttcagccatccctcctattgcttggtttcccagccctgcatccttctaattgccttcttctagacatgttctgatttgttgttctgtttgttctgagctctgaggtacccagaatgaggtgagagactgtcacagcccttgacagagacccatgccaccttttagtgaaattggctgtttcgatagccttaaaagggtcgttcatttatttcaagtttaatcgagtcattcttcacatacataactgctcaccttatctgctccacgtatatgtgtgatttgtcattactgaacctatgtgcaaaccacatttattcctaaagatcatcttatcaggataagaaggaacatattcatttctttagtctgcaaagatatgttggatctgtgttttatgatccaatatactgctatttccagcttcacatcatatgcaaattcagctcaaccactgtgtgccagacattgtgctgaacctggggatacagcaggaaatcagacagcacagttgcttccctcacaatttattgggagggacagacaattgactgtgcttttccaatccagggtgacagcacaaaagaggggaactgcagaagcgtagaggaaaggtgcttcacagactcaggctttctaggaaatgtgatattgtgagaagttggccaaggaaagagctagggattaaagtttgaggtaggcagaactacatatgcagtgtttgaaaggtgacaaaaagcacggtgtcttcaacagcttatcaccaggtaatgctcctgatcctcatcagtggctgatgtgaatgtggaacctaataggatgaaagaaattaccattagaggccttcatcatctgccttcgggcacatcaaacatttatgaactcacctaattgtatttttgtcacagccacgtttctctgccttgaccacttgaattgcatgtgaaatgtatttatgtctcactgaatacagacctgttctgtctatgtcattgctcaagtttaccaatctaaaaaaaaaagacttgttcttatgacttgttcttcataacccaggttggctttgagtgatcctaaaagcttccttccttcctgagagttcactagctctcttcctaataatctgttttattttccaagtcattggttaacgtagtaggttagtggcagagttgcacctagaccccaagtatctgaactcctagtctagacatctttcctttctattgctctgctcccccttggctcatctttccagagcagagacactacacaaggtttttttaagagcagctggtcagtccctgcatccaatgtaggaggcagcaagcaaggctagcagttacgccagggagaatgcaaagtggggtgtcctctttccaggcactggcgcaggccagctacatggcatttcatctccttagcaggcctctggggtaaactttatgtgttaaactttatggttaacagagccccctgctattcattgtctcctttatttatcaaccagccccatgaagtcagtggggaaatattcttgttcccatttagcagatggggctcaaagagtagaagagacgtgcccagaggcacacagttatactgagtagctgagccaggtgtcttaaatccaggttgtctgacttctggtgccccaagctgacttcagatttcttttcttcttatatcaatgatggcatcaactccctgacctcccccttctccagaatgttgcctgggtgattgggtaagaggatataaatagtaagtgaaaaaaatagattcagttccaagcactaaggggctgagacaactagacactgtggcagtgctacagacctttagatcatttttctgacactctctagctaaaaaggaacatggacaagtgacacccaaaagtccctaggcttaaaccaactgtcttgtggaaatataatataagtatgagctattctgagcaggatgacaggattggaattcagtaaagttttagatggactttgagatccaaataagggaggagtattataaagagctctataaaaatggtttaaggaagggtgtggtggctaatgcttgtaaccccagcactttgggaggctgaggtgggtggatcatttgaggtcaggagtttgagaccagcctgaccaagatggtgaaacctcgtctctactaaaaatacaaaaattagccaggcacctataatcccagctactcgggaggggtggtggcgggcacctgtaatcccagctactcgggaggctgaggcacgagaatcgcttgaacccgggaggcagaggttgtgctgagctgagatcgcaccactgcacttgagcctaggcgacagagtgagactccatcttgggaaaaaaaaaaaaaaaaggttaaaaatgccaagctagcagagagagggactcagacacacacacctaagttgttgctccagcctaagctggcccaccactacctgactgcagtttgttgcctgtcccgtcatgcttgccttcaaaatgcctttggattgttcacaagctcaggagccatgggcctcctcctgttgaggggtgtttattgtctaaatcccttacatgtgaattaaaaataggcaaaggtaaaaaggcaggagttttctaacaggtatgggagtgctgtagtaggccagtggcaaagactatcgccattttctttgcctgggacttgttgagtctttgaagtctacctgaattccagagtctagggcttcttgattccttagcaagagcaaagggatgtgtaccctctctttcaggctttggtgaattagaccttgagacttcataattaaaatggatttaatagaggcagggaagctgggatgtctgccccagtaagcaggcatcttctgtcagaaggagaatgtgtcctttgtatttaaacggtttctccaaaaggctctaaatgagatttgggacttaaacaagatttggtgtgatttgctaattacccaagttactattacctgattaacacaggaatcctcatagtctgttgcagtgcctttcttccgggtgccaggaggcttgacatctgtcacctgttcacttggaggcattttaagtaacccaaattatgtatgtcttttctgctttaggatttggtgcctgatttttacatttaaaagttaataactacctaaaggaggtttgctgccaaaatacaagagtgaaaactgacaaatctgtttgttgctgacagtgaggtggagatcttggtttattcattccaactagttaggccgagaaatgatacacaggacagtacagagctcttcctggtgaccatcacaggcatcaggaataaatcccctcaaatctcactttgccccaccaaccttaattgaggcctccgcttgagcagtgacagaactggaagggttggaaccagaaaagctaagtgtctttctcaaaatcacacaggcctgcagttaggatttgtctttcgttgttttttattttcaagataataaaaggtttccactttgaccaccaggagaccatgctgactttcatttcagagatggggcttcagtgtgataaagtgatctaggttagagtcttagcaggtttcccttgagatctgaatggctgcggggtgtgctgggggctctgtacagcagctgttaacagttttctccttcccatgaagacggcttatttacctgggtctcagttctgaagattgtttccaggtatgctgtgtactgaagggactgagcgtgatccaaggagcctgggacctatgtacttggtgaccagactctcctctccaaaagcagggacccaggggacctcatccagcatcctgagaagcctcgctttggacaggcctgaaatttcccttccttcatcctagctctttcatccaagacagtgattcgggaaacagtatttcaaaattgaaattcaggccttgaatttcaagtctagaagaactgtccaaatcatcggtaggaagagcttggaagaaagggaaagtcccactgtaatgctaaaagagagccacccagccagggatggtctgcatccagaccagagcacaggtcaaagggaaagccgagagcagttccctaagttctggcatggcttttggacgcaaagcagctgggctgcgggcatgctgtaaggacagaggaccctttagggttccatctcttcggagagaaagtccctgctgttccagttcactgagtgtttaagaggaaataacggcctgaggcataagccactcacccatataaagtgaatacttcctcaagggcacaaagagaccacttggtaaatgacttcacccacctgctttagatggtgctccagtgcactgagaatgttaacctcattcacccttctgtggatgagcagattattcctagaaaatggtccgttcatgtttgaccaggcatagccccactgtgaatgacaaagtcttttttgacctcccacgatctttctccctttctgtctcagccaagccttttcttctggaaggagctactctcttttggctagacgatcattcagaggagtcacctctgtccctccccctactgatacatctcagggtctcagagccgtttatgttcccatttttgcatcttgacatagggatgcaaagatgggaacatcaagcatcagttcttccgagccttcatagaaggagtggggggagtgggtagacatggagatgaaacaagactggccatggactgatcattgtgtaagtctggaaatggttgcacaggagttaatttaactactttgtttactttcatattggtttgaaatttcccataacaataagctaaaaacagatagtaagggatctcaagtgtcttgggcagtggttttcccattgccacaatatatgtggtgaatgggcattatctgcttggaaaattaacaaaattaaaatttacatatagatcagtgaaaacactgctacagagttaacttaaaattttagctgggtgtggtggctcatgcctgtaatcccagcactttgggaggctgaggaatgtggattacttgaggtcaggatttccagaccaagctggccaacatggtaaaaccccatctctactaaaagtacaaaaattagccagacacagtggctcacgcctgtaatcccagctacttgggaagttgaggcaggagaatcgcttgaacccgggaggtggaggttgcagtgagccgagattgcaccactgcactccagcctaggcaacagagtgagactctgtctcaaaacaaatcaaaaaatttaatataatatgtgttcattataaaaatcattcagggccaggcgtggtagctcatgcctgtaatcccagcactttgggaggccaagatgggcggatcacgaggtcaggagattgagaccatcctggctaacacagtgaaaccccgtctctactaaaaatacaaaaaaattagccgggcatggtggcgggcacctgtagtcccagctgctggggaggctgaggcaggagaatggcatgaacccgggaggtggagctttcagtgagctgagatcatgccactgcactccagcctgggcgacagagcgagactctgtctcaaaaaaaaagaaaaaaaaaaaatcattcaggtacagccagagagagccactgtagatagtttgaaatccaaagacgtcttatgtgggcattacccacagatgtgcatgcctgtgcagcttaattttagattttgttttcttttgctttgttgttttgtgtgtttgatttcttttcaaatcagatttatgtttcttaccagctcgttttaacaactttattcaaatataatctacatgccgtaatattcacccgtactaagtgtataattcagtgattttttagtaaatttatagcgttgtgtaactattgccacaattcaattttagaacattttcatcattccagtaaaatccctcatgcccatttgcagttagtccccattaccactcccaggtcaaggcagccacgaacctattttccatctctctagatgtgctttttctggacatttcatataatggaacaatacaatgttggtgggtttttgttttgggagactgagtcttgctcagtcgcccaggctggagtgcagtggcgcaatctcggctcactgcaacctccgcctcccggggtcaagcgattctcctgtttcagccttccaagtagctgggattacaggcgcccgccaccacacccagctaatttttgtgtttgtaatagagacagggtttcaccatgttggccaggatggtctcgatctctccacctcgtgatctgcctgcctcagcctcccaaagtgctgggattacaggcgtgagccaccgtgcccggccgtaatgtgtggtcttttgcatgtggcttctttcactcgtcctaatgttttgaggttcatctacattgtagcatttatccataatttgtttccgttaattgctgaatagtattccattgtatggatataccacgttttgtttatctgttcatcagcttatggacatttggattatttctacttttttggctattattaataatgctactgtgaacactcacatacagctgagtggacatgtgttttcatttctcctggtagatacctaggaatgaaactgctatgtcatgcaataagtttctgtttaactttcttaagatactgccacactgttttccaaatggcagcttcattttacatttccccagtaatttaggtgcttctgatctccacatcctcaccaacatttgctgttgtctgacctcctgaacgtgaagtggtatctcattatggttgtagtttgtatttctctaaggatgttttgaaatggggaactgtgcgtcttccaactttgttctttttcaagattgttttggctttgtttcctttgcatttccgtatacattttcatatcaccttgtcgatttctacccgcaccccatccctccccgaaagtctgctgaataagggtgttgagcatcttttcatttgtaattagccatattcttggatgaaatactattaaaatcttcttcccactttttaagtgggttgtttatcttctaatagacttgtaagaattctgtatatattctgtatataagtccattatcctgggtatatgatttgcaaatattttctcccagtcagtggcttgacttttcatatccgtaatgctgacttttgaagcacaaaaggttttaattttgttgaagtccagtttatcagttttttttttatggatcatacttttgttgttatatctaagaactctttgcctaacctaaggtcacagagactttcttctaagaagttttataattttaactcttacattcatctatgtggctgaggtacttttttgtgtatggtatgaaataagggtctagttctgtgttcctgcatgtggatatccagttaccccatcactgtttatcgaaaagactattctttccccttgaaatgcattgccacttttgtcaaaaatcatagacaataaatacacaggcttatttctggactttcatttctattcctttgatctatatgtctatccttatgtcagtaccaggctgtcttgattactatagctttgtaggatgttttgaaatagggaactgtgcgtctcccaattttgttctttttcaagattgttttggctttgtgtcctttgcatttccatatacattttaggatcatcttgtcaatttctaccccccccccaaaaaaaaaaaagtctgctgagattttcatagggattacatttaacccacaggtcaatttgggcagaattgcctttttaacaatattgagtcttctcacccttgaagacagaatatctcttcgtttatttagatctttaatttctctcaacaatgtattatagtttttggtgtgcaagtgttgcacttcttttgtgttattgtgaataaaatttttaaaatttctttttccaattgtttattgctagtatataaaaacattgattttcatattggtcttctatcgtatgacagcccaatttttttattagttttaatagctgttttgtaaattcctttatcagatttttccgtgtacaggatcatggcatcttggaatagagacagttttgcttctttcttgtccatatgggatgacttttctttttcttgcctgatacagaattttaggaattaaaactcatccaaagtcatgccaaagatcagtgattatacttatgatatcaatgaggagacaaaagaggcaacttttggaattttaaatgagccttacagaggcaaagggaagaatgggtgactgcattagcaaggaagtaaaaataccactctacagccagacatggtggctctcacctgtaatcccaaagctttggggcaccaaagcaggagaatcacttgaaaccaggagttcaaggttacagtgagctatgatcatgccattgcatttcagcctgggcaacagagtaagatcctatctcttaaaaaattttttaaaaagccacttcgcattgactcaggtttcacagtgctcctcttagtgggtggttatttcagcaacctgaccagaacagacaagataagccctgaaacaacacgaaggagccctgagtaggaaaaggtagacaccacacactctccaggctcatttatgtaacccactggaagatctctggtctatacagaacctcatcttcatgtctacctattgttttaaaaagcattggcacttggttttctagcttgttgatggttttgttttgtttttgcagctatactttaggaaaggtgttagagaagagacgaagtaggacttgaacataaaggatgccaaaaagtgaaaggacagtagctgatagtgagggggcatattggaaatgcatttaaatatcccatgtatatttcctggacacctacagggacaaatcttatgctcaagaatttaaaagcaccactggtaggtcagtggaaggcaactccccagacttgataaggtctgaggacattggctgagcaagccaagactccagtgacgccatccatttcttttgtggctgatgaatcagattcaagtacaatgctttataattatccctatgaaattctagcatgttagtgtcgacccattattctagtccttcggcacctctttggattctgattctggttttatgagttgaagattaataactaagctttgaaggatggggggattgccaaaaaaaataagctgaacagtgctttttttgtgataatcctgtgtcctcaaagaagttaagccccatttgctgcagaaagaactcattagctcctgtagcttctaaggaggatcctcatcaaagaatcttttttaaaataagtatgtaataataaaataaaacccaccatctagccaggcttcttgctattggagtgggaatttacagataaactagggaggaggctacactgatgcatgtggtaatgggttagagttaaaaatatcagtatgagctcatgtttagcttaacatagatacaaatagtcacatatagaaatctttacagatctgtgcatataaaagggttagtacccatatgtatttctgtgccctgacaactgagatggcctgaaagaaacggacaccccagtgtcaacaagcacaccttcatctagatcttggttcctattaccattctccaataaaaagaactaggactcctgagtgaaatggttgcttctggaactcaggcaggaatatacaagatgaacctggagtatgttatggtgccagaaagtaaggaagtcctaaaacaaaaaacaaaactcacactgataggggcacatcaaagaaacacagaggccaactgaaagagctaatggccactcctggataattagagcaaaacaataaggaagcatcggattataacccaaagtataaaataaatatccatgactccatactgatagaaataaataaatggaggagaaggaacaaacctcccacacagaagaattccaagtaatttacacagatacctcaccctcaagcaggggaagcataatgccccactccctcaatgtgagttccaggtagtggctccttcccaaagagtagtaggggagggggaggggagtccattgacagtggagagaccttcaacctggtgaccaaggacaatatcagtagtcacaaatcacattaatagaacagaccattgatacaatgtgaaaacaatggcatttcacctctgtagtcttcctcccaaaaacctctcaacccagtcttaatcatgagaaaagcatcagacaagtttcagtaggggggcattcctatagaatagctcaatattcctaaaaaatgtcaaggtcaccaaaaacaaggaaatttgaagaaactgccaaaagaaccctaggaaacatgacaactaaatgtaatgggccaccctagatgggatcctgggacagagcaaagatactaagtacaaattaaggaaatctaaataaactatggactgaagttagtagtgctatgttagtattggttcattacttctaacacacatgacatactaatgtaagatttagtaataggggacactggatatgaagtatatgggaatgctctttgctatcttctcaatttctctggaagtctaaaattgttcttaaaaagaaagcctatttaaagggaaaaccaccatcactaccaattttgataaacttgaagggttagcatcaattatctggaaaatttatttgtgagaaaaccttattcctttatgatcattgataagtgaagcattgctgaattatctctgcctctctgagcaagttaatactatatttttaagagaagaggagaagagaggggagggagtagggaaaagagtatgtgtatctttgtgtgtgtatgtgcgtgtgcatgtgcgtgtgtgtttaaacaagagaaaaagtgaattctaaattgttaaaaccttggagtggaacttaatctaatttatacgcagttccactagagatgtgcaaggatttttttgttgttgttaaagagaaaaactagtttcaagcattattaagcttttttccctcccagaagctaagaaaaccatctgtgagaacctgtttgcatgtttgttttctacaataaaatgcaaaatacttcttcctgttagcggattataccatatgtctctccctgtaacaaaatcagcatgtttattaatgaacccaatcagaggcaaagatttagaaagatttaaggaactgaattttccattcaatatttcagcaaaagaaacttctggttagacatcgttgttgtgcttggaaaatagaaggtttgtttttgctttgaactcaatttacttggcaggggacagagagcaggaagagaggcctttgaaaattttcgtaaaaaaggtctgcatttagaaatggcccttcctgcctaatgattcccctacggatttagacctacagtttatatgtgactaatatttaatttgatcagttacatttttccagacagactaattaaagtgcttgatggcccagatcccccaaatctgaagcagtaacaggcctgtgggcttcctggagtaacaggaagtgaatgaagtagtttcagccatattgtcaaagcaacccccatggtactcataatggaaacatgtgaattttccagcacaaacactttcctcacagccctgttgaccatctgaataatcaaatagattggtagcactaggtatagcatagtgtattagaaagaaatatgtccagccagacccagcactgcagttaaagtactggtgctgtcacgagccagcagaaggcctggagcaaatgacgtactctctctagaccccagcttactcctctgacaaatgaggatatcagctctgctgttctcttgtttctgacttgtagaagaatggacttgtcagcagagaccgtaagcagtggaaatcccaaaagccagacagaccctgtgcgtattttaggggatacattctgttctggtcattcagccttcacccaagccatctttttttctatttggtggcatagacacagcccagccaacctaattctcattttattgcattcattgttcatgtgccacagttttttagaaatcttacaagaaaatgaagcacctattaccaggacaccactgcaagggggaaaatgacacttgggcacctggaaggacaaagacaggcagtggaggcatcatggggttggattcgagtaaccctctgccttcttcctggggtctgttggcagtgtttttgtgctgtggtcatgatacacacaggtctcacaaggcaggcagccaagtgttgactctgtctttgtaggcaatacagaaaactgtctacttgttccagtgagctaaatcaagtgagaacaggaaagaggtttgtgcaactttggcaactatagcaggaaccactttaaatgggacagggcaagtaatgctaaatatttgcaaggtgatttttttttttttaagactttaaaggttgtattgggagaccttgagaaagaggcctttctttcttttttttttttttttttttttttgagacggagtcttgctctgtcgcccaggctggagtgcagtggtgcgatttcggctcactgcaacctccgcctcccgggttgaagcaattctcctgcctcaaccctcccaagtagctgggattacaggcacgcgccaccacacccaactcatttttttttgtatttttagtagagacggtgtttcaccacattggtcaggctggtctcaaactcctgacctcatgatccacccacctcggcctcccaaagtgctgagattacaggcatgagccactgcacctggccttttttttttttttttgagacggagtttcgctcttgtcgcccaggctggagtgcaatggcgcgatctccactcaatgcaacctccgcctcctgggttcaagtgattctcctgcctcagcctcccaagtagctgggattacaggcgtgtaccaccacgcctggctaatttttgtatttttagtacagatggggtttcaccatgttggccaggctggtctcgaactcctgacctcaggtgatctgcccacctcagcctcccaaagtgctgggattacaagcgtgagccactgtgcccggcctcttttttttcttttcttttctttcttttttttttttttttttttgaaacgaggtcatgcatgcaggctggtcacaaaccaaaaaggccttttgacaattcaactacctcaactctgggatgggcatttattaataacccccaacccacccaagtcctccaaataccctgccatccaggggaaaacacataaacatcaataaactgcatgtccccaagggatgctctttgccccaggatagtctggcctctcgggagatttctcttacctccagggctttgtttcaccagagaagccagcctggaggtagaaggggaagatacttagcagcaaaatctgctgccctgtgcagccaggccaggggggcagtcaggggctatacaggctgaaaagctgtccaggacccagagctatgtgactcataaaggcaggctgcccacccactgaaggtctccaagtggcagtccagatggacagtgatcagctgtcacattggacggttggcctcctgtgatgacaacactgtgccaaggaggcctgggttgaagctttgagcacatgttaattggcttagctctattccaccactgtagaattttttagttcaattcagcaaatattccctgggttcctgttctttgccaggtaatagagctggacactgtgaatgcagagatggataaaatatgtcctttagctgatggagagaaaaacatgagcaaataaatgtcatttactatgaaagatactagagtatctggaaagaacagtggagacagagaagggatggatggctgaaagtgtgtggttaaaacagtgcccacccatcttgcccagacacaaaccactcaaaaccaagaccctgttggaggaagcattcctgtgagtttattagagcaggatttcctgaattcttcctaggaatgttaaaagataaaatttgaaaaaaggattccaagagcaaataagtttgggaaatagtgagttaaagttagacaggttgctttcattggtagctcatgcttaagtgcagaacttctcaaagccttgagtatgctgagcacattgtgtgattaccccaggggaggagatggtattgagaattttgacttgggagcctttttccagagttacctccttggacctgggaccctcatattcttggaccctggcacagtgtcctgtctggagctgagagtttgcagagtggccttctagtcccagcactcccactgtgactgaaactgtttggctttgggaagtctaaccttctctgatgttgtttcctcattgtgttaggcaatttttgcatctctataaagaaatacttgaggctgggtaatttataaagaaaagaggtttcattggctcctggttctgcaagccataaaagcatggcactggtatctgcttggcttctggggaggcctcaggaagcttttttttttttttgagacagagtctcgtcgctctgtcgcccagctggagtgcagtagtgcgatctcggctcactgcaacctctgcctcccgggttcatgccattctcctgcctcagcctcctgagtagctgggactacaggtgcccaccaccatgcccggctaatttttttgtattttttaatagagacagggtttcaccttgttagccaggatggtcttgatctcctgaccttgtaatccgcctgccttggcctcccaaagtgctgggattacaggcatgagccaccacgcctggccaagaagcttctaatcatggcagaaggcaaagcgggggtaggcacatcagatggtgatagcaggagcaagggagagagagaggggcgatgccacacaccttcaaacaaccagagctcatgtgacctcactcactgttatgaggacagcaccaaaccatgagaggtctgccctcatgacacagatacctcccatcaggtcccacctccagcattggcaattacatttttaacctgagatttaggcagggacaaatacccaaactatatcactcatctagaaaagaagggaagagtgacatctgcctatcttgcagtattgttgtgaaataatagatgtgaaagcacttcatactcataaggactgggattgtcattgctgggttgtgacaatcgcagctgtgatcaagtcttcgaggctttagttacttgactgccttgaggttgtggcctcttgttatgcctggaattctcccttccttcacttctttacccaccccttgagatacttcttataaccatcccctaagttcaatgttggtagccctgagacttctgtccttggatcccttctcttgagaccatttatctcagagctccatgtgtcaacattacctgtcttctgataaccacccagttttctgtctctagcctttgcttctcccttaagttctggatccaaatgtccaacttctccccagataccttgatgtaattatctcaagctgcatactagtgcctcaaactgcttgcccttccccacacactgtgttccttcataactgggtgtcatcttaaaagtacttctggtaaactcctgctcatccttcagaacccaactttagtctagtctcctcttggctgacttcctcctgtgcgctcccagagaactttgtacctacacctaacatgccacttctcacactgccactgtggccattggtgtagttttcattaagtcaaggactgtgctttatttgcctttaaattctcatccttgagcagagtgcagggcgggcagtaagtctaattggatgcatatacctcattctagtcatgcccatgcagcagaggggagtttcatctttaatgccacatctggctttacactagaggcctgaacctgccggatgcacaattttgttcttttccctgctggctaggatttgcaggcacccagaagctgaagaccctcggggtctccagaggaggtcacatgtgcctctggccacagccacccctggactttcagctggccagtgctcccagctcccagcccttggctggcagaggtgagcaggagtcccacccactcctccccagcttagccgagtcatgttgatattctggcggcatagtcaggcttgttattgagcacatgctttgcagattagcctgtttgtatagccaatcgaacatgtgctccattaaaaattaaagcatcctgttttaaggatggagcaggagacatcagctgccactgtgtagcagacatgcaaagccccagagcccattaccataggttacagcaaatgttaatcagtgccagtgcagttaaataatgcagtttgtgcagatggcagctactacatctcctcacagatgtgtcctcaagtcccggaggctgctgtatcacaggagttgtcgggagcagtcagatctgatgctgactgtcaatatcaccttttgtgtttgtgtgcatcctccagccagctgagaggcaacgataggatgactccaggccctacttccagcagcccttccagagctggagcagggggtctgtgcagggctcacaggagagcagaaatatttcactaaatcgccaagaacactcagagtaaagctctgcagtctgctccatgaaactgtacccagctgcatcctgcaagaggcttcccagccaggtggagtggggatggcgttcccaccttcactcttcactgctttctgcttgctgatgggcaagaattccacaagtattcttcctggcttccataagcacagggacacctcactgtatcagaagttggagttctgacagcacctactgtgcacagggcctgattctgaatggcaaagtgctgttcccgaagcccaggcacttggctctctggtccaggtgtccctaccctccagcccctgaacagatactctgcgtaaaatttaggaacaaatcgccactcatgctgccagcagtaagcagcaactgttgtggcaagaaaagaccaaactgtttcaactgtcccagctcttctctctctctgtgtacttccttactagcagctgtgggggacccttccatgaaggggcacctagagcactgacatccacatgtgggcacctgggggcattccatctcagccactgtcaggagcaggcacagtgactggtccccatgaaggtggcctgttatcaagagaagatgaaataaagctcgaggtaaccaagtgtgggaaacttgtatggaagcaggggagattgctcttgatatagttaagtgttttacttaaaggtgtaagcctcagctttctgaaaaatatgctactgtagaacaactcatttctgaatagcatcaaatatgtgaggtgaaaatgtacttatgagaaaaatagttaaaagtttattcatcctatttcctttctaggttgtcagactatgtgctattcttcattcctagatgggaaacattgcatcttatgaatgtaacgtgttgctgtagacaaatattcttgtggagtgaagcccagggacaagggtcttttgctttccttgcaaaatgtagagacattattcctgtttcacctttgaaggccatgccatctgataggccatgccatctgatatggtttggctctcaccttgaatcgcaccttgaattgtaataatccccatacgttgtgggagggacctggtgggaggtaattgaatcacaggggtgggtctttcctgtgctgttctcgtgatagtgaataagtctcacgagatctgatggttttatagaagggagtctccctgcacatgctccctctttgcctgccgccatgtaagatgtgcctttgctcttccctcatcttctaccatgattgtgaggcctccccagccatgtggaactgtgagtccgttaaatctctttttctttataaattacccaatcttgagtgtatctttattagcagcgtgagaacagactaacacaccatctgatctgatggcttctacccttcctttctttctttttttttttttctgaggcggagtcttgctctgtcacccaggctggagtgcagtggtgtgacctcagctcactgcaacttctgcctcccgggttcaagcaattctcctgtctcagcctcccaagtagctgggactacaggcacacaccaccacacccagctaatttttgtatttttagtagatatggggtttcaccatatggtcagcctggtgtcaaactcctgacctcaagtgatccacctgccttggcctttcaaagtgctgggattacaggtgtgagccaccactcccagccagcttctactctttctttacttcccagtctcaacatcatttgtggaagattttagcaccgactcactcctttccttccattaaactcagcaatgacatgagcagctcatctgagccccaggcctctggattcctaacctccttacctccagtggtctttcctttatccacctctgccccccattcccattgttatgccctacgtcttgtcactacctataatgatgtcagtttcaaaattgtgatttccaaaccattagctgcaaagagttcaaggaactgagaggccaggatgctcaaaacccaccactggcttcacaccacacttagaacaaaggtctttcccctgctgtgagcctgcctactgctctgacttcgtctcccactactctgctccagtcacgctggcctttggtctggccttccaacaagctgagctaatttgcaccacagagattggttccattgcctgaatgctctatcccgttatatagatggtcgcttggcttgttctctcacttcattcaaatgtcatctccttggagagacttccctgactaccctattaaaacaacaacagtacatcccccaccccaaatcactctatctacttatccagctttgctcttcttcacagcactgagccaacatttagacagacacacccacacatccatatacatctatattcacttacttactgcctgtctgctccattgaagtgttggtgccacaaggacaggggttttgtctgtcatattcgctgctatatctgatgtgcctccaatggtcttccattggaaaatcaattgaatgaatgaaggaatatgtttgggctggaagcaaatgttggaaatggagttttaaaacaacagggttattttttaagctttctaataaactttctatcaaaagcatttttcaattattaacacttcataaatgaacaaatttcatcttctcaaagttacacttaggtgccaactagagaaagcagaagaattcattttcttaatattttgtgaaatccaggatagattattatttcaagctataaggcttccagcattagccttgaaacctcatctttattttgcttcactgctaggtgtctccttttttgtttttcctagaacttttgtttgacttctaattttgtcctctgattgaggactgaaacaacgtgtaataatctcacaccaggcaaatatagttgaaatttttagtggatttgattacattcttgaaagtggcaaaatcaagtaaaagcagatagatcagaagattgaaagctttggcttacaatcattctttttactttttaggatgtaaatcatcgtattggtcctttttactttagacaaatatgaccccataaagttttaaaagtttgtgtctgtgaaaaaaagcaagatgaattgtctctcacttccctggtttggaagagaagttccaaagcagggctgaactgtcatcatcatctaataattttcctttagttttcatttttcctttctaaatcttagcatgtgagatcacaggctccctctccaaactcatcagttgtctcttgttttaccagtaagaactgaacccctcatctcaaccagtctgtcaccaaggcacttgctccaaagactctgtaccagtcgagatgcttttagctgcaagtaatagaatgcctcatccaaagtagccatagggtagccatagggccaagcacagggactcacacttgtaatcccagcactttgggaggctgtggtgggattgcttgaggccaagagcttgaggccagtctgggcagcatagcaagatcctgtctctacaaaaattttttttaattagcctggcatagtggcacgcacctgtagtcccagctactcaggaagctgaggtggaaggattgcttgagcccaggagtttgaggctgcagtgaactataatccactgcattccagcctgagcaacagtgatgagatagtcagaggtaaccagatgtgtattaggctgactcctaggaagctttacgttaggttgataagatggctacaagcatggtatctccacaccatatacccaaggagggaaggaaaagggcagacctactccttaattgtgtctttctttttagcaggaaggaaaatcctttccgggggtcctgcagcagattgccccttacagataatagccagaactaggtcacgtgttgataaggtttagatacttgttcccttcaaatcttttgttgacattgcatctccagtgttcgaggtgggcgctgggaggtgtttgggtcacggggtggatccctcatgaacggcttggtgtcctccctgtggtaatgaatgagttctcactctactagttcacacaaaagctgcttgtttaaaaaagcctggcacttcttcccctctcaccacgtgccctgttgactacccttgccttctgcctcgagtaaaactccctgaagccctcaccagaagcagatgctggcaccataattcttgtacaagctgcagagccatgagccaaataaacctcttctctataaattatccaccctcaggtattcctttatagcagcacaaaatggacaaatacacatgggtgccacaaaccagtcactagcaaatatagattagaccacttggttatctcctggcctggacacatgtcactttcctacctgaacaaagttgatgttttctaataacagagaatgaaggatgacaagctgccagggtcgacaactaacaatgtctgctacagcagtacaacccgttactcctactgaaaaaactcactccaggtggaatagtagcttatgtcagggtctgtattgataggccagtagattataaagtatttggaagtgatcttagaatctctgctcatttatgtcaccactgtttcatttacatacctctaggatagcacttaccacgtggcatcatgattccatgtccacaggtctgactgttcctaccagattgtcaccaggaaccccttatttctttgtgtccagagtacccaggataatacttggaacttaatagaggtagaggctcagtcggtgtttgctgaacaaatgaatgaataaactaacaacaaataatgaataacatattcctgaagccatgcgttatgaagaacagttggaataactataggtgtttacctggggaatgaatgaatgaatggacaaatgaataagcaaatgacaactaagagatttttggagcggtgtccaatgaactgttgaaatgacgagaaatgttgacatggagaagagatttgaggaatacagtgactttttgcaacgcaggatttaaaagccttttaagtgaaagagagatgagacttactttgtgggatctttaagggtagagctaggaaaagtgggctgaaactacaaggagacagaattgtaaaactaaaatctaaaagtggagctatgtaaagatggaatagactgcctctggaaagaatgagctcactgtcaccaagcagagagtggctaggcatactctcaggcagtggtaggattttatcattgaagattggacttagataagaatgatacttattccctggtataactgggggtcctccctcgtagtgagggtattctctgaaagtatgaaaaattaaacttttaccacttaatgttaacatgaaggaggtatgtggtagccctttccaaagtaccaagagactttatgatgctatgagacatcttggagtaatcccatctgtctttattattcccaattacatgtgccatttccctgttgagctcatttctgatagaagaaatgttttttaaaagaaaacgatgttaatagatgtcactggttttgtctgtcttaacggattctgtttctcacttcaggacattatccagtttatactttattaaaattggcctcatgcacccttgaggtgagtgggtagagaatgaggagaagagcctcacttcccggagatggcggagagggattgggcccaccaggtattctttcaaatgggctgccttactgcccacctgcaggactgaaaatcagagaaaagcggtggaaattgagaaactgtaggacatcattcactctcgtaattacagtgaggaagtgtgctgcatatgtatgttccctcagtaaaacaggtgttctgcccttaaaatgctaattatagactattgcagatcaatgatcttcacttatttcatattgctgctccattttttccacatttaactaccctgtgatatagaaagcttgctcacccttgaaaaaatcaaaatgcatatggattttctgaaataagccccttttctggaagtattttgtggttagtttcaaaatgcaatatcctgagaaaggtttaagtcggctttttattttaatatataataaaaaagtaaaatcactaggcaatgagcaattttacttccattagcctaatgtctttgtggtttcatctgaggtcactagtagattatttttcttgcattatttcatcagctgtcagttctattacaatcatgtaattcattcagtgctgtgatttttcaaagacataactgtaagcttagaagacagttttttggaagtttatttagatgattgtagggtgtcagactgcctcaatcttctccatgctcagtgtctgaagggtcaccaacagattgtacatgaccttagatgctcgagtaattatcaccactatgtttttatacccagcacataaaaatatatctgcactttctttatcatcatcttttgaaagactgtggcctgcctatgggctgggcaattaggtttactacttagattacaggatacatgatacagctcttatttaacaccaacaataactctttttaaggtggtttcatttcaagcttagtctattaatatattcaccattgggctttgattacaataatgcagtttatttatgtttgcatatagtgggtatcagtcaagaaatcatttgaaaatcattcactgaacaccagctactcacagcttgttagtttctggtggttataaaggaattagaaattctctgctcttgaacatattattgtgatccatcaaagcctctagcaaagtagtcatttagtttggtttttgtgaggtttttttagtacgaggataatttttaaatattaaaaaaattaggccaggcacggtagctcacgcctgtaatcccagcactttgggaggccgaggcggatggatcacaaggtcaggagttcaagaccagcctggtcaatatggtgaaaccctgtctctactaaaaatacaaaaattagccgggggtggtggtgctcgcctgtagtcccagctactcaggaggctgaggcagaagaatcgcttgaacccgggagggagaggttgcagtgagccgaggtcgtgccagtgtactccagcctgggcgatagagtgagactctgtctcaaaaaataaataaataaataaaaattagaactctacatagtaatagtttacctttattatcttgtaattttaaaagtacaaaatgcacatttaagatacatgtgcataaaatgatatgtctgggatttgttttaaaattatctggaaaggtgggagtagtgggaatgggtagatgaaataagactggccatgagttgataattgttgaagctgagtgctggtaggtagcagtttattatacagttctctctacttttatggaaattgttcatttaaaaaaaggaatagaaggttactatgcacagggagcagtggctcaggcctgtaatttcatactttgggaggccaaggtgagaggattgcttgagcctaggaattcaagaccagcctgggcaacatagggaaaccctgtctctacaaaaaaatacaaaaattagcccagtgtggcagtgcatgcctgtactcccagctgctcaggaagctaaggcagcaggattgcctgagcacaggaggttgaggctgcagtgagccagggttgtaccactgtactccatcctgggtgatagagcgagacactgtcaatccatcaaacaatcaataactatgaattcagctttgcttttaaaaagaaaatatattttaatgatcattgaagcatttccatatacttgaaaaatattaataattgtatgagaatagcatataatttcctgagactatagacagagctttgtgctcatggactctgaaccctttgttgtaactattagaatacaatagacaagcaagttcaaggtagcttgatacatactgtacacaaacactgagcacattccaagggatgtgaaccttaactacagaagcgtgtatggagctgctttaatttactgtgactgtgttgcatagaaaaggaagacgaccgtgctgccacttaagtactgataacatttaacactgtgtgcataagattgaggcagcttggaaggtccagaatatgaagcaaagaatccgatccattcagaaaccaagaaacctccaaataatagcactttcactctaattcagcctctgccaaatttgcctttggccaattgtcaccagtgccaaattaccaacagacttccttttctggtcttagtcatgttgacctcttccttctgtctcctagtcaagcagaatttaaaacatttacattgtatttcaatttctatgaagatgggagaggaaaggtgtatttcttgtcttttgtccctggccagcttctactgggaacttatttccttgaaattcctgtcctgtaaaagcatgcagatgaaagtatctttaatgtataattacatttttatatgtgtataatcttagattacatgggaattgagtatctggaatggatcggccttaggaaaatgtttctttttaaaaactattaaatattggaacattatacaaaaaaatagcattgaaatatttaatctgtggttcaggtctgttgttcatttaaaggtttaactgtttcccactgtttaaatatctctatctgatctttcatgctaagttagcatgtccaaaatattgaaaaacagatgaatgatcaaggaacttaaggaatactcctccagtgaagccagaaggatattcttgaggagaaaaaaagaatgcatgaaacttatttaacaagaaagatttgagtcaggtaatctacataatatatccactggcattaaggctgtcatcttggtattgcatttctggtacgaatttcgcaatagctgtctttcactgtcggttctaataaagagtgttggtcagcttaaattccctgggagctcagagttatgttttgtgaactgcatgtgcctgaggcctctcatgcatgatttaaactgctttgtaaatgtcaataggtggaaaagcattggatcccttgtagatttctccaaatcctcaaagatgtgtatgccatgtataaaccatgctgcactctcaaggccattgccgttttttatacttgcctaactgggggtttaaggtattgctagaagcaaaatatcagtgtgttcatgtctcgatccaactggccaatgaaaccctttattaggaaaacctttgcaccagagaaatgtctccagtgacctgaaatgggcacacctcatgaatgttgaatgttcttcaaactctatttcttcattcttgacttttttcaaaacatacatttgacttgattgaatttactgatttcagagtactgcatccattccatggacagcagtatggggtcatcaaaaaaaatttccattgagagtgcccagacctgggtcctatcctggttctgccactctctggctctttgtccttgggcaagccacttaaccttttgggggccctgcttttctgatccattaaataaaggaggttgaattaaatgatctctagttatccctcacagctccagcatcagtgattccaagagatagtgacagaaaaccagtgtgtcacttttaaagccagggaacacatgtgactttttaattgggctcattccactctctgggcagtacacagtgccggcagaagccccaaaatggccagcagcaatggcgtagggaggcctgagtgttagcttgagggttcatcaactcattttcgttcaaagcacttcctggtgattgttttccatggacctgggaactgcactaagggcgctcctcccacagtgtgccctgaccccccaggtgtgttctttaggtaaagctgttttttaatgtctgaagaggccaaagcaaatgccagtgagggtatagctctctaggatctccagaatagaggcaccatatgagcaacaacactagactgggtttctcagagtctgtttctcacacactttagtacctctcagcttaacatggtacctggagatagaggtgcttaggaaatgtatgcttagcaaatgttgcagaaagagtttattcggagtcatagagccatcggagcagatggtcttttttgttttcttcttcatgttttgactcctacatagttcagaataagtcactttggtcttttctttgcacatgttcactttctaatatagtgtcttcttggggagactgttttatggggaatatgtgagttcatgtgttagctgtggagccagcctgcctgaatttgaatcctgacttttcctctaactgtgtgaccttgagcagtttccttaaccattctgtatctcaggttttaatctgtaaaataaggataacgggagtacctagctcttcagattgtgaggattgaatgggatatacacataaagctctcaatgcctggtgtgttaaagtgttcgcagttgttacttttttaaatgtttttactacttttgaaatttagtgttcaaggtgaactttttacagaagagccagggcaattggatgcactttgggggaaaaaaaaatcacttgcctcatccccatcttctccatcgcagtgaggactgttctcaagtgggcacacaggacacctgtctccttcatctgcaaggccccagtggctgtgctggggtttgaggtctctcgttcagaccaggtatgtgagggcttggttatcatgcactgctcctgaatccaccatctccatgtccacatccttggcagggagaccagagccaactgggaactctgccacctggagagacctttgaaacactgtcgccaccagtgttccatttgtgtgtttgcagaatgccaagtaagcacattctttttcaccctctgacatgacctcagggttactttctgtggctgttgacaaatttttagacatcccagttttatcagcggaaaccttgaagagtgacaaatggttcttggaagagttggtacatactataaaaatgtcagctggctcatttataacccagtgatgtccagtgtctgagccgtgctatcagcatggtctatagataactcaccctcacgatgctccgctctccccaagtactttgtgcagctgttctggttgaagacccagttgacatctataatagatatcaaatggagagcctcttattttatcactctctgtgtttcagcactggcggtccccatggactgtcagaaacaggcagccagcacgttatgggaaaggtgacttgctgagtccctgtgccctgaggacattattaagtgctagggaaccttgttagctcataaagttggttcaaaccaattattgttctgcgaccattaccattgccaagaatgtaactcttttaaattcttgcccataaagccgatctttccattacattatatcatagagcaagacttctgatctggccgcacttgtatcccaccggctgcaaagactaaacattgcatttgctgctcaatattggttacccttcagtgcttcatggaggcagcaagactgctatttatagatttactttctgtctccctagttcagcacagtcagttttgacacactgtcccagtaatctgatcagccatgctgcttttaaatgaaggtctaggccttggcctctgcagagagggtgacagctgtcagatacagatagtaggctacagatcctggctgctaaaaccctctcattcattcctgttacagatcattgaccacagcttgaagccatgctttacagttggccgattagttggcaagagatctacatactgtattagcaaggtcaaccactgagataaaggcaaaaacgtaaacccctgcactatttttaaaccagtagccatttgttaaagctggttattttggtacttgtctccgttcccctcttttttttttctcccaaaacaaaactcaagaaacttgttaaaactcttcggcagctaacgaagatgcctcagataatgagatggttcaaacctgagaaggaaagatgaggtctttctcagaaactcatttaggaacctcggataggaagccgtgttagctgtgcttataccttgttttaatcagaacgtgtctggaaatcttagtccagggagacctggatgaaagtgcagccagtttgagtgctctggccatgacagtaggttaggcaggtctggcctagaaagaggtaagttatgattcatacaagtttaaatcctcgctcactcctgaatgaggtggttgggcttggttgtcagctcagatgattggacccattttgtaggtgtttccttctccagagtccttccttcccccagcatcttgtctgtaggtattctaaagccaggcattattcaacacactatattggacttgtgtaaagagaacttgcaccctgggaaaccttgtgttaaagtgattaattgacttcttcatattcagtgaagatccttgctgtttcagaatcgacacaaacgaccaaaccttcaatctcatctttactcagaaaggggtccacctataagattttgaactctccttcaccatctgaccagcctcctctctgctttcacctctcctatgccttcactcccactgaacgttcctttaacttcatgacagccaccttcccctttacccttctctgtgtcctgctaagactatgtggacccagctggggttcccattctttttccaggttatactctctatggtctctattttgtgtcctcctccctctcttctgtgaccttactgcatcttcctgttgcattcccatctcccatctgatctcttgtctttcactctctacctcttgttgacttatgaccaagcacagtttccttagtgtacaggggcacccaaggcccttgacaatatgtctgtccaccatcttgtagtcttgcctcctgctttgtttcttctccacctctctaaggccccatgcacacatttgctgaacacaccctgccctgtcaagcttctttggctgcctttgctattcctccaccacgtaggtcctttagaatggcaagccttacaatgtatagtatatttagtatacatacccagtaaatatttgtaggacgagtgcatgaataaaagcacaatgtttgacattgttatcagcattgacccaaaccctttgagctagatgagcaataaagattagaagaaagaggttaggtataaccacaaacaaacttgagattgaaggctcgctagaagtagaactttgggtggatttctctctgtgacttgattttcttgcctataaagtgaggtaagtgatatctgctttataggttgttgggaggatcaaagaagaaaaaagggaagtaaagtgcctaacacagtgtctggcaaatggaaggaacttgatagatgttaattacctagctgtgccatataactcccaccccatcttcagtgttctgtgaaatgtattttcattttacccttggaaaggtacaggacaggatggaagaccagtttgatgggagagaaggctgggagttacataaacccccatggttttctgacttttcactagagtcaataaggagatgtttaaacagactttggcccacaaaaggtgactcactctcacattctcagcttcctgctcagggaatcagtgtggaaactgggcttccacttctcagcttcaaactggagctgggaaactttcgcctctgtggaggagccttggggaaatctcagcccagctgccatgaggtgtgcaaggggaggacgtgtcagccctggaaactccacaggcctctgttccagatgcacagggcagtcacgtctttgcaggggtgaagcaggaggacaccctccctcctgttctgttctagcagccatcatgaggtgggacttggagggaatctgatcctgttaggggaacgatccagtccggtgcagagcagctttggggtattaatgactgtgtgttccacagggggaacttgtccatttcatttatttgcaataaaatatatgagaggaacatctgcaggcagcttatatatttgtcaaatttagaagtaattcaggcatatgatggggagccatggcgattttatgaattttctattgttatgcattcgagttcccatggcatcgtttggcctagctatggcagcccagagaacagaggcggtgctagcagacccacgtgacacatgccgcgggcttgggcggatgcctggcatgtgaagtgatccagggtgctggcagatgcagacgaggtgggagggaggtggaggaggggcatactcatgttttaggaggggaaatacagggtcacctttgtggacggcaaatagccaggtcctgaaacttgcttctaatgaattccttacatgctgttgaaatggcaggaatcataatagcttatttcatgtgcctttgaagggttccagcaaatggagtctaagagaaggcagggatggggggtgggggtggggaggcaggaaaagggggggcgagagtgaaatattactacttaaaacatattcttagacataataaagcattaaagttaaaatattgttgagacagctttcattatgcatgttccaggcctcattatggaataagcagaagtgactgtgcagccgagacctaacaatatctgcactgaattcctattatgtaagaaaggctttctagtccctgccagtgtcgggatgtggtggttggttttcaataaaggtcagaatcggtgccacactgaatagagctaaaagtgtgtttcattcttttgtaggccacgggcactgttggggattgatctgaaaatctggtctgttgcgggcctttgctctcaagggagattaatattttagctattcctttttgttcagtgcttctaaatgtatttggaatgaaaagaaaggttaaagaggggctctgggacggctagcttcagagactagatcatttcatgaagggaaatcaattaaaaaaggttgactgtgaacatttatccatttagcttagccgctattgaattttcatgatggacttcgactcttcggagagaacggagttaatggcaattgttcctttctcctcaaaatttattatctggtttattcatggaaaacactccatcaaactagatagaggccttaggcctattgatagatttgcctgtgtggggttggaatggggaggtttgtcacagatgtccagcctttgaaggaaaattaaacaagtatctcattacagaatgcttcactggtccccggaggtggccacagacgcagtggatttaatgagctgggaacgtcaatgctgccaaagtttacctcgacctgtctttctgaagaactcctctatttaggcccactcaagcaaaggagaaaggcaccacgctgttttctccctttcaactccaaagaaggggataatgcactttttgtgccatgcatccagaggaattatgtgtgctaatttgattaggggagatttgattaactggaaaatgagggctttgctaagactttcacacgcttaatttatcccttgcaaagcagacgcaacattgtgtcatgaaactcagaaggcatatgggaacagtattcagtggttagacggcctttcagacccaacaatatcaaggattgccacggttcatattgggataatcattttagagcattcgctttgctgcagaatacaaattgggtttggcattgccagttaaacggttcaaaggataatgagattaatatagtaggaaacttagctgagcaaaaagcttttttttttttttaacaccattgcataactagttttaaggggaacttagttgaaaaatgcttggttttctccaaagaatgcattaattatgttttgtggttccatacactcctggtctttcttgctaaataaacatatcgtgcatcatccagatcttgctgaaatttgggggatatgcattgaagcagcccctgtttctccatgaaggtgtatgtctgtgagcctggctgtgcagttgggaggcctgggggagaggtcatgcttctaccatggcgttttccattttccttaaaatgtgcctcagcaacaggctgccaagatctaatcctgttcccctacccccatagcagttggggaattaccaacaaagtctttaccatctgacattccccaagggctgtgtaagggggcatcttacccctgctttcttgggagtatatatttttaaaaagttgaaaggagaccagcaatgccaatctctactaacatctgaaaaaaggtcttttttaaaaaaagcatttcacattcagaagacacctggaaggtccctgcagagagagctctgggctccatgtgccaacgatctttgaatagaatcccttggagtttctacccgtatgtcttttttctaaagatccccttgcccttgatgattgcaaacttccacatagcttcagaagccatcttcattgtgccaagtttatttacaagcagatttggccctctctgtactttggcctacatagtacaagcaacgtttgaactcctgttttgctcttagcaccagaagtttgggcttttccattaaaatcagtcaatcaggaaagagtgcatgcatgctgggttttaactttaacacaggctgggtttcaactttcatggtgaattaggactgtctcctgccattctcccttggcttgctgcactgtagaaaactgtgaaaggagccactaactagggcagaccactggcccaatttgaacaggactgctttgttttagctggacctagaggtttaaatcacaagacggctactggattcccttctccccgaccccctcatggccaccaccactagccctctgtaggaggagaacttcactgagcacctgattacctgttctcgctttaggattagatcaagataggacagagaggttgttcatttgtaggcttgttgccttactgtaggagtagttggattgagtcaagccatccttttccttgggaaacaggcccctgccgctttaagtggagttgctgggtaatcgttccgctcggttgcataaccagaaagggatgtgtcaggactgggacctgcagacagcgaaggctttattaaaacgctcgcagagacctagacagatgagtggtctccagttggagttctttccatcttccccatctgttcactgcagttttaattaaatctactgagattatttttggccttctccaggaacagaaagccagcctgtgccaatgtccactcgtttctgtgctttactgccagccactaatgagcaggcacatggggcacccctgcctgtgtgcacccccttcctttgccagccatcatgagttgctaatagggtaggaactaaaagtgccaagcccaggcctctccaccttctcccacctccacccccaccctcagccccaccttggtgctaaagaaagccagctaacgaatgattccacttgtggttagctagctaatgggaatgacaggcttcaaataaccttaaagcatgcagccccaatgcttgtctgtctgatcagggcccttctgctggcacctgacactttcaataccataatggcattcacatgcattctttttgaatgctgtcatatagcaagacctttcttctcttcgtttgctgggaggatgcctggcaaagctattaagtctgtgatgggaatgacagttaactgcgggcctgtcagtcccactttggaagtcagcacatccttatacccattaggagcatatcataggaacttcagaaataacctgctgcaagataccatcaggttgttgcgctgcctgcaaacataccacccaacgagctttgcacatcattctgccctgcctctcattaagggtctggtttgttgatatttggtagatatttgatttctgaatttcagattgggacatagtaattacttctggaaggtagcatggctgtccccaggtagttggcaggtggtggttcttcctatttatggtcagtgcttcatggatttgaggacttctgttagttgggtttccaagagaagttgtgtcttggaatccatttccctaattgaccccctaggtttccaaagcagactctaggcagatgtacattttttattgcacttgagtcccaaattctggcctaatcaccaacaccagtgcactgggcaggactgtgagtgagcctcagtttcccctcttgccccaagttcaaggcctacaagagacccatctgagtggcccaccctcctctgcgctccctaagaaggaaaggggtcaaagagagggatccgagtggtccagagcaactgctgcccctgctgagctgtgtttataacttctcattcctcccactgatagtctcacccctccacagtgatcccttgctctgttcttgaagactccattttcattgacccatatcagcacttgcattttggggttgatgttgtggaacctaaacaattagaaggttggacttagagcttttagagtcttgatttgtccatacatacagcttgactttctgctaagacacacgcttccactcctaaccagcaaccgagaatcaacatcttctgtgtaatttccaggaaatgcctttcaaactcactgccattaggtagctctccaaacttcacttagaggaacaatgttttagaaggattccaaaaataggaataagtgcagtcctttttctctagattggcattttctgaaatgtttcctggaatagtcttttcgtaatatattaatagacgccactaggataaaggattttgtttgaaaagtgttggattagatcaaattaagcaaagcagtggagagggcaatattatgctgtgtttaccaaacagctttgaccacagaacacctaggaacatttcatagatcccttggaacacagtttgggaaatgctactccagaggatctggagtaagacaaaccagcagagaaccagagttagcctttctggtattccagtttagaacagcaccatatgctctgcagatagaggctctaataaccctatgacaccaatgccaggacttttgaatgaatgagtagaaaaaaatattatttagtgtgctatgtgttgttttgcttatgtagatccttgggagaaataacactctgattgcagagttacgaataattgagccttttttgaagagttggttttccttttatcttgcaacccccatgaactgtgcaactgcttagcttcccatcatcaccgtggctgctggaagcctagagccagcttcctggcccatctgttataaataagtggttaagtgatgggcagacttcatttccatctccactgtgcatacccacatggtttatttttccttcttttctaccaataattttaaaaatcctcccccctccctgttatcttttaaaggtaccctaaatccttttggtcctttaaggtactttaaatcctttatccttttggtcctttaaggtaacttaaatccttcggtgtagggaatatgtaagtgatacataacattacctgttaccagtcttagctacttaattgataaattgacattggcttgtctgagattattgtcattttgggttgatcaacaaggttgatgagcagttgatgtatagccacagctacggcaacagtttcttagtttcagaacataccatgtgttttgtctggagactctctaatcactgaaacatgaaaacaatttactaagctatgtttttttccccaactgtggcaacatcataaagcatttttgttcatatgtgttttattgggtttttttttaatttttttctttattttttttttattttttgagatggagtcttgctctgtcgcccaggctggagtgcagtggcgtgatctcagctcactgcaagctccgcctcccaggttcacgccattctcctgcctcagcctcctgagtagctgggactacaggcgcccgccaccacgcccggctaattttttgtatttttagtagagacggggtttcaccatgctagctaggatggtctcagtctcctgaacttgtgatctgcccgcctcggcctctcaaagtgctgggattacaggcgtgagccaccgcacctggccttttgtccatatgtgttttgtcctcagtagattcctagtagaatatgaaaataatttgcagaagatatcctagaaagttagagctaaaagggaccttaaagatcatctagtctagagatggcaaataagtttcgattgtcctgctatctatggtttgttagttggctgcctggaggcttgtattgaagattctgggccatgaaggcatcaaaggctaaatcgattagtgatgtctgccatgagcatggcatgaaggcaaggaagtgtgcatgctgcacattttctgtccctagtttctcccttttgaccaatgaaatcacctgagacagaggtggcactagaaatcacgtctttattctaagtccaggactctttgtaaccccatcttgctgaagtaattatttttcttccaactataaacgttagtaaactagagcaccaaaacaatatgcttcttctagatttgccattgagttcactgtaaagtgaaatacaaaaccaagaatcagtccccctcttcattatttttcccaacttctgatatagttgaggaacgaggcctattctatactgggacctacccaaatttttcttgtttatacttagccatattatcatgatttggttttttttaattaagactgttttggtaagacatattctccagcaaattcattttccctgggtccttctttggttaagcatgttgctagctatagccaaaccaacaggtctaagatgcctaagttatattatcttttcttttcttctttcctttctttctttttttttctttctttttttttttttgagaaacagagtctccctcctttgcccaggttggagtggtgcagtggtgcgatcatggctcactgcagcctcaacctccccagggttcaggtgatcctcccacctcagcctctcgaatagttgggattacaggcacatgccaccacacctggctaatttttgtttttttagtagaaacagggtttcaccatgttggccaggctggtctcaaactcctgagctaaagcaatccacccatctcggcctccacaagtgttgaggttgcaggcatgagccatcatgcccagccttatattctcttttctaaaaaaaaaaaaaaaaaagatgaagggaggaacattttagaaaaatcaagttaggcagctttgctatctcagtatgcaatgctgagaagtgtcactttaacagacttaatcctttcaaataataattcaaatgaaattgagatgaacagtttggctcttaaggactttttttcttgagacaatgggattcttttttctaagcaattaatttgctaataaaaaaaatggtgctgccctgttccttatttgctttatttcatgagaaatcaggttggcaatcttgttcacatatttacccatggaacattccattccatctccttcaatgctgaagacatgggtttcaagcctaccctgcccagggataagacagagcaggtgcaattaataaaccatcttttcaagctttccttccagtggtttgtagactgctttctcctgacatgagtcaagctatttaatgtgatggaattcatcttgtaaggctctctccattcaggctaagtgattgaattcacaattcctctgatttagtgcctcgtttgtcactttcttgaggagaggtttttggacccatttagttgggagattggctggagcaggaagtcggggagaatctgcccctaagccaccatttccttccacttcaaacatgattcataatcagtctggaagaagcaggaagatagaggatgaccaactgctctgagaagcaggctgctgtgaagttgattacgtttgcaggacagcctctaagatgtcttcgaggccaggacacagaccctctagaagccagccattttagccacttggggctccacaacacagtgccttcgaacgtaaccagcactgactcggtggtgtgcactgggcctcaaagcacattcccgtctcttatcattcagtagcccagtgccaattagagtggacgtactagacggtttcactcttgcaaccctgaaacagtggagtttcagggctgaaagccagtctgacttcatcctgaccttcagctatgcacatgtgccctgcgctgtagcgtggctgcctgctgaatgggaatggggtaggtgtgcttgtcccagcatcattgacattccaggaggctgcttcctgccggtcctccccctcaccaggtaccatgtttcctattagttcttcaggaaggaaggcaggtcaaaagggtggatgaagtaggtcagaaagagggcagtctctagtaggaggggacacagacttatttactggtaggaattctctcctgtggaaaaacagttccgaattcagcctcaggatacaagccccacctctggaggtgctcaggccatgagggctgcagctgcaggtcttctgttcgtcaacctttttctcttgagctgaacacaccagactccctgcagaattgcttgggtgtgcagggagagtcaggttattttttaattgaaaaagacattttttcttgagaacatgggaacactacaaaccttcaaggcaaatggaagaacaaatagatgttccagtgtctaggcccagaacaggaagttttacgttgtgtttaacagatacgacaggatttgcagaggaactttaaaggagcccaggagtccgctgaaaatgtatttaaagttttgtttgtgtgcttgtgcatttgcctcagaagatggttcttggctttcatcagattttcaaatagaatctgtaaccaaaaaaatagttgaggctgggtgtggtggcccatacctgtaatcccagcactttgggaggccaagacaggaggatcacttgaggccaggagtttgaagctagcctggacaacccagtgagactcctttgcttcaaaaaaaattttaaaataaggccgggcgtagtggctcacgcttgtaataccagtactttgggaggccgaggcgggcagatcacctgaggtcgggagttcgagaccagcctgaccaacgtggtgaaacccccatctctactaaaaatacaaaaaaatttgccgggcatggtggctcatgcctgtaatcccagctactcgggaggctgaggcaggaaaattgcttgaaactgggaggcggaggttgtggtgagccgagattgcgccattgcattccagcctgggcaagaagagcgaaactccgtctcaataaataaataaataaataaattagccgggtgcgatggcatgtgcctatagtcccggctactcaggaggctgaggtgggaggatcgcttaagccagtgagttctaggctatgattgcaccactgcattccaacctgagcaacctccaacctgtttcaaagaaaaaaaaatgttgagattcattgggctcttaaccagagactaactatgcacacgccactttggaaatgtatgctgtttgttacccaccacagtactctcacccacctgaccccttctccctatccaaccttagccttaaccaagaacagacctggttcctagtaagccatgtttccattcaccaaggtttggggagccttccctgactataaaagagactctgctatcacttttatttcatcttaattcaggcatttttttaatgtggtgtagttgacttgtttctaaattcctttacattttgtattgttcacacagtaaaaatgtctattttaccattccccattctaatttttcatcatttagtcaaaggtggggccaaaattgagctttagtctatgtatagtaaggttttgtttcattttgttttgttttctttcaaccagaagaataaaatcagaattttagagcttgtcttacccaacccacttttttttttttttttttaaccagagatgttaagtcgtttttcaaggtcaaacatctagttggtagtagaggtaatgagttgttttattctttgctcttatcgaagaaaggaaattatagaattaatggaattttatgaagttgggggttttctttatcgttatcattaaaagaacgcagtgtggttttatgaaagcctcacacaggctgtcttctcagcccttttcagacccgcactctttcctccatccacatcctctcccttctccccagccccaacccttccttccacgtcaagctgagtatacaaagcatcccatatttcaggctgaggcctacggagtgggttcccactggaccctctagcagcctgcattctccgacttgaatggctgcatgtggagagtatgtatatttgttcagagctcttgctttaagttaccccttcccaccacgttgcccaaagaaataggaatgtgaggggaaaaggaaaggaaaaataccacaggtattttcccctctggggaagcttgggactcaccacttcacagaattcaaggtacagaagcatcttttcatttagcagaaggctgcaaagtgtgggtagaatgctgagttttgttaatgaattgctgttcatttccctcttcatcgttcttagtagcttttagaaaatgtgtctgcttttgacttgagccttctacaaggccagagatgtttctacagagagcccttttcttgcaaataagaactcctttcacttttgttcatattgtcccaccatgttgctgcctttaaaaaaaatgtgttgtatatataacctagattatgtccctataaagtgagtttgtaacgactccctcatgagcttagcaaaagtatgtctagacaattttttttggcttttccccccaaacttctttgggttaaaaatagggaaggacttgttttaatacagtgtagtactgtatctttaaccttttgtccaaacgcatattgcctgtttaagttttatttagagaaagtgtgtaacttataaaccagctcgctcagaccttggggccgcccctggctggtcttcctgctgcccgtggattagcctagtctccagaagtgttttacaggaagcttaggcggagggaagcacttaattattatccaaatttttccctttagttaagtcttacggtaagatatcccagagattatatttttagcaaccactttaaagagactggggagattaatttaaaattgataatcgcatggcagcaccacagcctaacaagctcaaggtctgccttgtggagctggctgctctctggggaccccagttcaattctctttgctgccagttgaaatcagaaatcacaaccgcagtgattagcagtgaattccctgatctccctgctcgaggcagagggagagggggcctgttttctaagtagccagtcgttaactctttcatgggaggggcggaggcagaggtagtgattcatgggtgtgaggtggggcctagtaatctacaccttcacagaaacttcccaggtaatgcttagagtccccagctctgggagcttctgtttttaggggagtggtggacagtgagtgaagaaagagccttttgggcccatccaaggctgccctccaggcaccatgaccgctgaaacccgcaccgcacggctcaggcctctgccgagcaactctgtccttctgggcgagcctttctttgtggaagaaagcaaaaaaaactgccttctgtccctcttccagcattcttcttttaaaaatggcctctggctaccaagtggacaattatggatagctctgtagagcagcggtaagcagtgttaattagctgcaggatatcagaaacaaaaatgaaaatattttccctgtgggccaaacaaaattaattttaaaaattaatgtaaaccactaatgctgcaagtgcctccattaaattacaggactgtgacatgtacaatgctatatttttgccgttgaatttgttatctaagaggtgttcattgtttgttacggtgtgaaaagctgttttcctccagataagcttgttcattaggaaactggatctctgccaccaccctgtttcttcgcactgaagtaatgccctgtagcataaatgtagacagccgcactgcatttaatatcagaaatgtaaatcaaaagcgtccagtctggttttaaatggcttcagtctttcccagggtgaaatctggggaaaaatttcttctctgtgcagcttctgacaccactgctttagcagacaggccctgaaagcaggctgataattattaaacaaagtatcttgtttcccactgaggtctccggatcgctctgtcattagactggatttatttctagggtttcattcacgctgtgacagcttgggatttataagttctgtgttttaatttcaggcagaaatgaaactggtcaattgcaatttgggagggggaagaacccttgataaaagggctgtgcatcctaatgcctaaatacagagccagaataaagaaggcatcttgggtggcatgctgcgacttcagccacagctgccagcgaacttgagccagccctgggggcagtacagagacaggccgagaacgccatgcttagtgcagccccagagcaccccttcacaccacaggcccctgttccagggaggcgagtgctggccttgctctgaagaaggaagggggagcaaccaggaggaatccctcgtcctgccagccacgaagggcgtgtgctggggcagtgactgaaaacttcagtgtttctctggctctgtcttcattccagaagctctggcacacaggtggaagcctggcctcacccagccaggagcatgtaggttctccttgaacctctgcaccctgcttttcaaggtgttgagtaagctcagtgtctgatttctttttttcaaagggaaaccaaaattattaactcctctgatatcctttctggctcctatttacttacttagcaagcatctaattcagcactatttcaaatctgaggggtgtgttggtaaccagttgggagctgagagaaaacctgattagcagtaagcttatttccatagaaacaggccaattaagatgctgtgtgaaaaagcagtggagagccctgaccagtcaacttttgggggtcctgcagggggcaaactgtccctgccctgctgtggaaacagctggactgacacacagagaggagactctagtcctctggggggtgctgtggctttctgcggggctgctggtgttttcttgcgctcagagcactttacaacacaggcctgaaacagagcagcatcaggagggtcgctagagctacactcccgcttctcttccagaatcccctatttgactgaccaggaaactgaggttctcattaatgacttttctgccaaaagaggcacaaacaaatgaactccttccgagagccctatcagatgttgcaacgtaagaggcttctagtcggtcatacagatcgcgtatattaacataggaactgatctgccatcaccaaggtgaccataggtcctggtttgcctcaaacagccccaatttatgcctgctgtacttgttaacagtggatatcttcactcttaaaagtatccgagtttgaattctacgggatgatcaccctcgctattacccacaatctagccagttggttcaaggcgaataacccctaatgggaccagtgaattagaatctcttgtttaaaagttgtggaaggctacatgtgggacaaaaccaatgaaataaagatttatttatttatttatttatttatgtatgtatatatgtatgttttgagacagtgtcttgctctgtcgcccagactggagtgcaacggcgcgatctcggctcactgcaacctctacctcccgggttcaagctattctcctgcctcagccccctaagtagctgggattacaagcatgcgccaccatgtctggctgatttttgtatttttagtacagacagagtttcaccttgttggccaggctggtctcgaacttctgacctcaagtgatcctcctgcctcagcctcccaaagtgctgggattacaggcatgagcgatcgcgcccagccgaaataaagttttaaaacactcgaaacaatgctacatggcatttgtatctatgtacaaatatagcaaaagtataaatgccataccgtgcatgataaatatcaaattggtgagtgtgtaccctgcgggaagatatctgaaatatatatttctccagctatatggtggctctacaggttttccttacatgtattcttatgttatcctatacttttcctgtagtccaaaaatatttcataatttaaaaagaagcaagcaggccttcagccaacagagaatggtttcattaaagtaggggagtgtatttgttggggtgcatgtaaggaagggaaggattctatttagggttaaacatctcaagaattgctccaggaaatgatgcgattgggagcatgactgaagcgttgcattgtactctgggatagcactggtagacaggcactccagaaagcacaggatgcctgcccattgcattgatgtttctcgagttctcagcactaaggcttgcatcctaaactctggtgtgggaaagctagctgcatatttacgttctgggtggatttgcctccggagaccctgctgttcaatcccattcagtttgcaggttaacatttactgttcctgtccttgaggtcagcacttgcccacagattttcctaatttctttattttactcttcctccaacaattgcaataacttggatactttctcttcactacttgcaggaaacaggaaggaggcacacagtgtgatacacagtcttgggttgatgtctgttttcaaacatgtttttggaatctccatttgagtagtttaggtctaattccagtcataccaactggcttataaaagccaccaggaatgggtaaaattgctccagaatgggaagggagcagcattccatatggcaagggatttttcttttttcttttttgagacagagtctcactctgttaccaggctggagtgcagtgatgccatcacggctcactgcagcatcaacccccctggacttgagcaaccctcccacctctgcctcctgagtagctggaacaagaggaacataccaccatgcgggctaattttttaactttttgtagagatagggtctcactctgctgctcaggctgttcctgaatccttgggctcaggagattctcccatcccagcctcccggagtattgggattacaggcatgagccaccacacctgcccaggaagggatttttcaagaggaaatgagacagaaagagtttggactgagtgcacatctttctctaccctcaatgatgtttgttagcactgcatcacctggcctagatggtccttggcaactaggtgactgatctgagtattttacattgcagcatctgtacacaggtgatctgtatacagcaagtgattcctgtaagctccttgacaataacagcaataataacctttactcagcacatgctgcatcccaggcactttggtgcagcactttacatgactttctgtcttccatcctcacagtcaccctttgaggtgggtattaggatgaaccatgtgaaactgccatttttgtaggtcaaaaacagtcaaatattggcaattgtatgtggtccaatctaataatctttttgtaatcaaaaacagtcaaatattagcagtcctatgtggttcaatctgatcatcttactgtatttgctttgcaaatagagaaattcagacattgaaacttgctcaaagtccacccatctaccaggtgccagaactggaatttgaacaaggtactcccctccacaccctcacactgaactgccgccgcacagtgctgtctccttgggtggaagaaaaaggcatatttttgtggcctaggtgttaaataggttcttcaacaacacctcggccaactttgagatcaaagatggttggtcagatgaatcaaatgtttcctggagtcttgggttacactcgtaatgctctgtttaaaaggaatgatatgtagtgagcacatcagaaatctggaagatggaaaatctctctttaggatctctgctcctctctcgagcaaagaaagaaatcggtgtggtgccagcagaggtgttctcagcaggacctggcccattaaatgaaagacttccatgctgagccaatcaagagagacctggacaaaaatcagactctttcctgccctggaaacccatgccttgaatctgtaattcatctgttaaatcaagtgtgcagccggtggtttagcacagagggggacgacggggaagagagaggggcaggagctgcagcacttgaatttccagcatcagagtccagttagggaaaagaaacagagctgtgatagcttcttggaccttatgtttccagcaaagagaaagcagcaggaaagatttttgaaaacagatgagctggtggaaggtattagaacaatggcggaagaggcagggaccccaggggctgaacaaaacacagttccgctgttgcctttcaacaagactgaataaagtttaggattttttttttatgggacttgtagccgtttttaaactttcatttttcataatgtcacagataatctttttatctattatccactggctcttttctgagaggcatttgcatcaaatagtgctgtacagatcatgactgtctctagtggggaaagcagcttgaaatgaaaggttattcactccctctgctttcgctggctttgttcttgattctcacacatttttttacatctgaattcgggtatttctggagtttttctttagaaacccttccattctgagatctaagcatattcagactccgatctatatatcaggggttacaaagcttatgcctactgaaagtgaagcatgtactttgaaacatttgttggataccccatggtttccaaaatcccttcagagcatttcctacagaggcagcaaccgtaaaaagcggccagtcacacagtgggggccctttccctagcactggcctcctggtggcagtggagcagtggccttccaagcatgcactgcgagacatgagtggggcaatccgctccttccaactgcagggagaacgggtctgcagaatgaattctctttctccactcctcccatgtggggaacaaacgagagccctcccagggggcgaagtggagctgcaggagagcatggtggaaaacccaggagccacctgggctaacagggaatcaaaaatgacctttttgtgcacaaaaccccctgggaaaaaaaatgacctagaaagaagtggggttatggccaggtgcggtggcttacgcctataatcctagcattttgggaggctgaggtgggcagatcacttgaggtcaggagtttgagaccagcctagccaacatggcgaaaccccatctctactaaatattcaaaaattagcgggatgcggtggcagacgcctgtaatcccagctactcagaaggctgaggcaggagaatagcttgaacctgggaggcggaggttgcagtgagccgagattatgccactgcactctagcctgggtgatagaatgaaactctgtctcaaaaaaagaaaagaaaagaaagaaagtcgtggggatatgactgatagtttctgttcagcttctattatagtttcttaactcatcaccccaagctccagggggactctgggggaaggttgagaccaggtttgttctcaggcctgcctgacagagcccctcaggaaagcatcatccactccagctttctcctctgctgttccccactcaaacactcctgccattccctctcagaaagcccagaaacctttcttcccctccccaggaggagggagagcagtctgcagaggcaaggcctgagtggccacaatgacttaggtattccagctgtgcccagaacttggtctcagacaagtgcacccaggttagtagtgacctcagagaacagtggccaggaacttgtttttgcatttgtgtgtgtgtgtgtgtgtgtgtgtgtgtatgtatgtatatatatatatatatgtataaaataagggggcactggcccccagagaagtactgacaacaacctctggttagagggcagttctttgcagcttttgatgacaacctgcgaggagagaatgttgctctcaattgttcaagaaactgaaagcttagagaggttgaagcgatttgccaagttcacgggctggtgacggagtgggcctcagaactcagatctttctgactcaaactgccttgttcttaccatcccctatctccctagaggttgttagaacttttgggggcatactgttcctttattttagaaactctttggatatagggtagtggttgaagcagctctgaggatctgttttgaagagaagggtagcattgttagactagtagggtaatttccttttcccaagctcgtccctccagacctttgagccggtcatcatagttttatattttatgaccgaaaagaaacttctgttaaatcgtaaatacactaaaagccctggtgcctaaacacatgaacgtattatctccttgagcctggaaatctcccagcaatgtggcaggaatgtagaaacagtctgagttgtcaacaaaacataacagatttcccagttgtaacaaacatacgtgtagttgtgaatggaaaactctcccaataagcaaaataatggcctttttcgtgttgttttcctcatttaccatagctgtcctttcagagtgccatcggtttcaaatgtttcattgtattgatatttataacacttctagtaagcagagtgcccactacattatttttatttaactctctccagagttaaaggaacttgtagttaaggtgtcatctttcagatttacaattttacctagattggcaacatgggtggcaaagtgcttggaactaagacagaaaagttggttccagtcctggcctgcctttgtgtgtgacttgagtaaggctcaggaagagaggctgctgatacccaccccacctgtccccaccccacctgcccccaccccagatgggtcccaaggcaaatgtgaaagattaggtgctcctgaatgtgacaccagacgtggtgtgacagagcccatttgtgggtgtctgtttcaaagcttttggttcataggccatgctgcccgctttgctggaggaaagttccaagacccacaccaggctactccttgacaggaagcttttgttcctagcaacgggtttacccagtctttgtttgtttgtttgtttgtttgtttgttttgagacagggtctcactctgtcccccaggctggagtgcagtggtgctatctcagctcaccgcaacctccacctccaggttcaagcggttcttctgcctcagccacccaggtagctgggattacaggcactggccatcacgcctgactaactttatatatttttagtagagacagggtttcaccatgttggctaggctggtctcaaactcctgacctcaagtgattctcccgcctcagcctccgaaagtgctggggttacaggcatgagccaccccgcctgccccgactctcttcttaatatgctccatgcgtttgtttatgctccccccacctgcaacatactttgtagtctacgcatgtgtcagggctatttgctggtctcttttctctcaccctgatctggctgtgagcagataatcccccattcctcaatttggctggtactgcagttggcacggctctccaaactctgcagccaccagacatgtagaaacaaacctctaggcttcccaggaggctcacggactgcctcatggctgagccttcaatagagatgatcatctatgaaaataataacaaaaaatgttgctggttataaatgcaatatatgctcaatagaaatagtagtctataaaattagaaagttatgctgttataaatagaatatatgctcattgtaaaaatgtagaaaatgtaatacatattaagaaaaaatattcatatttgccatcgatatatattttacatatttgtatgttttttcagtatgacacatcaaagaaagggcagaatcttctttcttctcttaactttttgtcgtgagcaatacagtgttaagttcagggaaggaattgagttcggagccaaactgcccaggtttgaattcagctctgccacttgctagttgtgtaatactgcttttttgtttggtttggtgtattttattttatttattttatttttttttgagatggagtcttgccctgttgacaggctggagtacagttgcacaatctcagctcactgcaacctccgcctctgggttcaaacagctctcctgcctcagcctcccgagtagctggattacaagtgtgtgccaccatacccagttaatttttgtatttttagtagatatgaggtatcaccatgttggccaagctggtctcgaactcctgacctcaaatgatcccacccgccctgtcctcccgaagtgctgggattacaggcatgagctaccacgtccactgcctgcctgtcttttactgaagttgtagatgtcctctttgcctattctctgaattctacccctaccctacccatggtgacccacagagtgctttgtatacaataggggtgtcattaatgtttgttgaacataaatgaattaaaatataacatcctaaaagtgatttcaaactttggaatttaggttttgttgtttttgttttttattagagacggtcttgctctgttgcccaggctgcagtgcggtgccaccatcttgactcactgcaacctcaaacttctgggcccaagtgatcctctcacctcagtctcctgagtagctgggactacgggcacaatccaccatgctagctactttttttttttttcttgtagagatggtgtttcactatgttgcacaggctggtcttgaactcctggcctcaagcgattctcctgcctctgcctcctaaagtgctgggattaacaggcatgaaccaccatgcctgacctgactttggacaagttatttggcatttataattccactttctcatctacaaaatagagacaataatagtacctacctcatggggctgttttgaggaattaacacaaataaagcacttagaataatgcttcgtgctgtgcagtaagcactcaataatctaagttggtaatattcctgtttttatatcgtgttttaataaatgagaacataacattttaaaatcaaggagctgtgatttcatgctctgcacactgcctcagtgacataaagactgggactgaagctggggcatcactccctttggtttcccctctcctaggcccttagtcacatacaccttggagaacaggcacaaccgagaggacctgcatttcagtgatgtccgaggccaagggacaaggccagattctagtcaggtgataatggaatgagagtgttcactgcacatgtcttaatgaatggagatgataaggggtcaccaagccctatatatttatagtgctttatttttcatccaaaaacacaaagtgctgtttagtccccacaacaatcaggaaagcgaggaactattcttcccactgaggggatgggaaagctgagtccccttggtgggaccgggctgcaggcgcagggacttgctcccctcaaactgttgtggtctcaccacagtcaggaccagtcacttgaacagctcccatttccccagaatgattctatagagaggcaggagaaccctggaccctgagcaggagacttcagtccaggggccagcagcgcaagcacagcgtcatagaacatcatagaacatagaacattattctgctcagggcaaaataatgtgggctgcacagtctggcccaggcagccctcagtgttgtgccctcaagtgttgagatgacaggaggatggggtcaggccagtgatcctcaaagtcagaagaagaatactatgcctcaatcctactcatttcctttccaaactctccctagagggcctctaactgtggctgaggggaggggcggcactttttgatacacggtgcaacttgcccactttgaccctgacctttgctctgtccccttcaggtgaccctggcaagtagctttttagagcagtggttctcaaacttgagtgtgtgcagaatcccctggggttggggggcagggctttgaaaatacagattgctgggccccacccctagagtttctgatacagtggctcagggatgggcccaataatttacatttctgacatctgggttcctggatgctgctagtggagagaaccggtgatttgatagcattggtgagctggctcaactctctgctcaggaaagtgacaggatgcctcaaatgctgagtgctgcgtattcaaattccaaacacaaggcaactaggatgggagcccttctagactctgtgtattcaaggaccagggagaggcttagcagctctcagctctcctggcacagagagagttctctgaagcttgctgtttttctctctcctactttgatagtttcctccatttgtatgggcggaggttgcaaaggccagaatagactcagcgagagtgggagatgggggtgagtgagtgtgttcacttttgatgaggagcagatgtgacaagcactaaaatggagtgggcaataagaattattactagctgaggccgggcacagtcgctcacacctgtaatcccagcactttggaaggccgaggcgggtggatcacctgaggtcaggagttcaagaccagcctgaccaacatggagaaaccctgcctctactaaaaatacaaaattagtcgggcgtggtggcacatgcctgtaatcgcagctacttgggaagctaaggcagaagaattgcttgaacctgggaggcggaggctgcagtgagccgagattgcaccattgcactccagcctgaacaagagtgaaactgtctcaagaaaaaaaaaaaagaattattaccagctgctttgtggtcaggatgtcccaagctggcactgcagcaaccgctgttagggggcttggtgccatttgcaaggatgtcatcctcagccactggtttctaggcagcccctccaggaattcctcttccatgcacctccttgggcagagcgttgaggtgtggtggctgaaattcaggaattattgtggaagcttgagtttgcatgcccactccgtttcctactaactagctcaggggcgggggagtttctgaactatgttggcatagttcagaaacttaatgtttaagtgtcttaatgtatacgatggagataatgctctctgatttactgacctctcgggttgtgggctagacaccagagtttcagagttctcggtgcactgctgtgtattcctgggaatgcccctgagggtggagctctctgtaaggaaggcagccccaagggcagggctggtctctttagaaagactaggaatgaggacacccggcgtccaggcctagcttttccacccactcaccttcacagctccttcatcctttctgcttcagttccctcctctgtaacatgaagttggagtagatacttcattcagagcatcttccggctgtaaatggcttgagcccattgtcaactggaagacagagtgtgacgtctaaaaacccaaacagcaaagagcatctcttccaaaccacccaatctggagaggtggggcagttttgtggttccggcaccgacaccgtccctttcacacggtactgagccgcgggctgcttcggggcggccctccccgccccgtgccttgccgggatggcagagcggatcagaagctgcgcgcgctctgcctgcgcgctttgcctgcgcgctttgccgccgcaacccgcgcagcagccaatccgctggtgcactgcaggtgacctcccccgggcccgggaataaattgtcaagtttccccaccgtgggtgtctttgctagccggcgagttgcagtcttctgagctaattaggagacggtcatgaggagcgaggcgggccggggcgctccgcgggccggggcggggctggggcgggcggcgcgcagctcctgggccgaggcatccgcgagccgcgggtagatcgctcgcgtctgatcgccgcccgggagctcccgcggagccggctgccaggactcgttccagctccagtgcggggctgcccgggcgtccagaggcggcggacggcgtgccggcaagtttccccggcacctgccagtgcccgcgaacccacctcggaagccagacccggggaggcagaggcagaggccggctggctccagccgtggtaccgcacggctgccaccctcggacttccgtcttgagtctcctgaggctgagaagcagcagatgccgaacctgccccctgacgtggacgtacacctcaagacctaaaatgcgccctgcctggagactttgaacttagtcttctggaaatgcggagaccgcttcgggtggttttgtttttgcatcctcttcggctaggtttggctttgggattctctggctacctggatacgcctttcctttgtgggcaagtctcccgcggatcgcagcaccagcagccaaccctggggcacaccagcctttaaaacccccgagcctggagacgcatggagctagagaagaggacccaactcctgaccacgtaaggactctgattccacctttcccgtgatggagagaaatataatttcatggcagaattttctttaagcacattgtctgataggattggcaattactaaccaggaaaatgagtagcaattaggagttcagtaataaatggaagtctattgtcctaattgagtggaattactgactggtaatggcaacactgaattcttcagtttaattaagagtttatataattatagtgcactttttatttcttgggggagccatggggtaggaattaaataaccagtgtgatggttaagaaacccatttaatgggtaagtaaccaatgagttgaaatgaatgtgagtgccttgctcaagcaatgcaaacttagatgaattcctgataaagagatgtaacagcttgggccaagcaagactttcagctgctaattcctgtctgataaaaatctgaacggcttagaaatgattgggtaatctctaaaactggcacactgaaactgttttagagataccagagctccctctctcctgccggggtattaaccccgatttgtgctctctgtcgctgtgttttccacattcttcaagagtgaaacgagtgggtcatttgagagtgcttttgcagcctggggtttctgtatggaaaatcttgtgattgagctgttgagctgtaaatgttgatagctgaaggggatagacaagcttcatcgaagttactcaaattcaaagcagagtgagtatgtaggtgtgcaatttgggaactaatctgtaattataaagatgttattttcctctttggtggtgtattgtttcctttactattatgttctcaagaaattgttccccttgtgggaagcagtgaaattggagagaaatccctgctcagaggataattacttatatttttggtgtaggtttctgggaatccttttaaccctacattgggatgcacatatttatttccataagaagctccagcaggtttggaaatcactaggttttgaatacactggtagataattagcacttcaagtaacaatatttatgccactctgtaccttgacttctttttcttgcttacacgaggtctagattttcaacaggatgatcagggactaccttctctagagagcttgcatattgcaagtgggttcagggagcaccattatagttgcatttcactccagaagagacagtgagtggcatggaaggggcattgcatcttgaatactgcatgcgttttaaagtttgcagagcttattcataaatccgcttggttaatgagaaaaaagcaggtatcgaaagacgtttgctgtatgtgtgcctcccagtctcagcccttccaggtgctttgcaggtccctaagtacagagtgtcactgtccagaattttaagggcttacctaccctggtttttcccctctcccctagtcctgttttgtcattgctaccatgaaaatctagcaaaagtgtagaaagttgtgtccttccagaaccacggtttctcagtgcaggtttactgtattgagcgcccactccttttctgtttgtattctgcccaaggcacagcagacattcactccttttatttcccatgaaattgtacaacaggcagaagcttgaagatacaacacggatggaaatttgagccttgtaacgttcaaaaatgacacaattgccaagtttcctaacttttcctaagagttgattaaagatcacaacttcatatcgctcctttttccctatgcatttgccgtccatcacacacctgactgtgagctgttgtaatagctagatgaggtttaaaaaaagagggagtaggggctcaaggattgctgtcctctcagaaatgttgcccaaggctaccctaaggctcagcctacccccagattctctttctgacaagtgggtgtttggtaggatggtgtgaaagtttccttctatgataacatctttaagatttgtttccaaattcccttttttttctttttgtaacctgctgagaatatgagtctgtaacctatgtatttatctgaagtcagcctgaacagatagaaaaactgagttacaaggtatgggactcccagtaaattaggaacagatgtgggtcaaaaacagatttccaaactctttatcaaatgatcccacttggaaacaagacatgaacaggcctaactactcttaaaatgcaaggtttgtctgagggcaaacatgctggaaaagatggtggccaccaccctgcctctacttttcttttcctttcatctttcttcccaccgtctttggttccctgcataggctgtgtagtgggtatcagtcagcacttgtctgctggttgcacaatgcagattactcacttctgcccaagtaactccctgaagccgtactgtaacaatagagcatataaaaaagaaactcaggttgatcttggcccctgtccaaggggattagctagggagcacctgaaaggcctgtgttgaacacactcacctgtaacccagttccatggcctggatctcaaggacagggtaatctcagtaccttttaatgacctagtaaatgtggtatctttctgtctttacactcgacctgatggctcatagagtctcctcattatggagctggaggagtactttgaggtcatctaggccctcactactcaaagtgtggaccatgggtcagcagcattggtatcaccaaggagcctgttagaaatgctgaacctcaggtccatccctggatttatagaatcagaatctgcgacaggttccccagatttctcatatgcattatgacaggtggggttgtcccatgatccaactctgagatggagtttagccagtggcgtatttattaaggagtgccctttggatcaatacctatgggaaggaggaggaaggaacaggaataggtaggtagagcaagaagtcaagcagcaatacaggcccagtgacagtcatcactcacaacacgggaagctacacagctaggtcagccttctaagttgtctgtggtgggcagggatggccaggcctttcaactcactgcagacagcactcccagcagtcagcagcaagtctgtcattagacagggatctgggtagctcatcacagtgtccaccacatgcactgaagttgggagaagctctattctgggtcactggttctcaaaatgtggctgcataccaacaggaccttcagcaccccggggactcattagagatgcacattcctgagccccacccacagctactgaatcagaaactagggtggggctcagcaacctgtgttttcacacgttctccaagtgagtgctgcatgcccaagtttcagaaccactgctccaaggcagccttttttctgtttgttttgttttctaattgttattgaaatgattcacagtccatcttaataataaaattcaccactttaaagtgtacaattcagtaattttgtggggtttttaggttttttgttttgttttgttttgttttgtttttgagacgaagtcttgctctgttgcccaggctggagtgcggtggtgccatcttggcttactgcaacctcttatctcctgggtcaagggattctctcgcctcagcctcccgagtagctgggactacaggcgcccgccaccactcctggctaatttttgtatttttagtagagacggggttttgccatgttggccagactggtctcaaactcctgacctgaagtgatctgcccacctcagcctcccaaagtgctgggattacaggcacgggccaccgcgcccggcccaattcagtaatttttagtatatttataacctgtttagtatatttgcaaccctcgcctttacttccagaacattttcattatccccaaaagagatcccacacccattagcaatcactctctgcaccccctcccaaagtctggcagccactcatctgctttctgtcactgtgaatttgcctgttcttgatactttatttaacttgagtaatgcagtatgtggcttttgtcttgtttcttaacgttttgagagtcagccaagctgtaacatgtatcagtactccatttccttcatgggacaaatcatattccattatttagacagtaccacattttgtttctttattcatccattgatggtcatgggttctttctactgtttggttattgtgaataatgctgctgtgaacattggtgtacaagtttctgtatggacatatttcttcaattctcttgggtcaatacctaggagttgctcagtcatatgttaactctatgtttcactttttgaggaactcccagactgttttccaaagtgactgtaccatttgacattcttacaagcagtttatgagagttccagtttctccgtattatctccaacacttgttaatatctgtcctttttattatagccattctagtgaatgtgaagtggtatctcagtgtagttttagtttgcatttccctaatgactaatgatgttgaacatagttttcatgttttcattggctatttgtacatctgctatggagaaatgtctattcagatccttcttagggcagctctttttgttccttaaggaatccctcagtatgtcagctttgtgtccagtcctgtgcaggtgttttaggatttatgaaacaaagcctacaacctgtggccattacccactggaaagttctaatcagatgtgaaactgtctaaaaaggggaaaggaggacaggagagcccactgtcgagggttagcatgaagagattcacattctattacaattcgtgcttcagaaagacacggtgtgacttgctaggatagagtggtgtgtgtcagggatgtggcggctgcagactgctggagaagactgggaatgttgagaggaagaggaacaagtagagaagcggggacaggaagttgtgggcagaccttctagtattcttttatgggttacacacacctgtaagaggggatctcaggagcccaagatttctttcaagatcatgaccttcaccagcctcagcaaggtgaagcagttcacctttttcttcatttgggcaaaaatgacctgcctccaccatttctcagagtgtttgtaaagactgattataatactctaaacaagtgcttgaagagtgtgatttattctacattacaggtgagaaaaaagtttgtaggtgtccttaaatagtctctgattccctattagcagatcctcatggtggcagtgccatgtccatcccaaccccccagggcaggtgcctctctcaagatacctgagactaccaggcacatcctcagggctcccaggcagcttctctttatggttgcaacacaccttgaaaatgacatattggggcaaaagaatttcaaaacagcaaaacctttgccatcatcctctcacatagctagggcctctgcacgtatgataacaagacagctaccttagacttatgtcatgccatctaacttacaaagtgctctctcaaccttgcaccagaggaaaccaaagctccaggaagtgacttggctaatgtcaccggttggactgtagcatgatcaggacctgacccctggtacattgacacctgacccagtgttttcatcgggcacttttaccttacaggttgctaaggattaatgatgggatgttttgattcttagtctataagtggatcctctcccaggaggctccaggtctccggatgccaggcactcatgttttatttggtgttgcagctgtgtttcattgtagtaacatattccaaatgctatgagatcaccctgagtctcattgaagaaaagtgtttcaaaagtatgcagagaggtcaaagtattaggaaagttctagaatgtacttaaattctcagtttcttccaggagcccctctgtaacaggctgggtcgtaattagagtatttggatcactgtttcttgaacacattcaacacaaaactgtggcaatgcagaattcaaagagtggatcaggacatttgtgtactaagtagccctgtacatactggataatgattttctttcgtctgttcgccctgagttctctagcgtataccctgtcttgggtaagaatatatcctgaaaagtcatgtgtcaggttgatgtcctttgagtcctattttaaattcacaagtggtatgtgctgagaaaaagcagatcctctgataaagcaaagaactgtgttgtgaaaaaagttattctatccctactcattcatttcttctgtaaatcaggattttaggtatttttttccttaaagctagttatatctacgtagaagatttctgcatacttctcttttttgtttgttttgtttttgaagaacaaagtatataaatgccctctagagtcatagacacagattgaaggtggcaaggtgagcaaaattggcattttgtcccattaccccattttccttttcttttcttttttttatcctaagcaggagagaagtgatctgcaagtttctcaggatgcttttgggtaagagtttcaccataaaaatgtcttcacccacactcctcccagtgtcagtgtgccaggtaccctgtcacctttggttgatgtcctgatggattaagctctggacagagccacacctttgaagaggcttcttggccagattaacacaccaaggaaagtgcttcagtctagaacatgccccgtcgctggggtctggcaccctggcctctgtgctgtgccctcctgcagcctgtgctgtgctctcctactccagtgcttagaaatgccaagtcaaggatgtgggggcaggtgcttgagagagggtcaaagtgctgtcattgtaagaaattattcatcaacctcagatagtatcttccagtaacaaaccatacaagaccctggccctcgaggaggagcctgcaaatgttagctcccctgccagccaaagaaaatcaggaaaagagcaacagggaaaatactttatttttaaggagatattttgccaataatttaaattgcagctttcttctcttaatgaagaaatatgcatttcgtgatacccagcctcccccagttcctctgaagcagagataataataactactatttattgaggactagcagccaggtgcttcagcactttagtattttctgccactcaaaaaatcaatgggattggcatataatgatgccaaagcttggcaaggtgattttgtctgggtttaaacccgggtccctctagcacagtgctttaaaacgtgcctggcccacaatacaaacacaccgtgacccggtgtaaggtgttttgtggaactcaccaaaccactcaataaatatcgactgcatgaaatgaatggctgaacttcttaggacaattttattctttttgatggtcatttcaggtgtcattcctctccacagaatggtagttatcacttacctttttatatccgcacagattaaaagctttggtgactgtcgcttggttccattttgtgctctcctccaggctggtgatgggctggggtgggccgagagcaaagtgtcagtgcccacagcatgcatgagctactgctttcaggcctggagatgcagaaggtgggccttacctagctgctcttttacttgctgtgattgtgtaaggcagaagttcacccttgctctgcagcaaccatcacagagagttgcaccagccagatttgcgttcagcatgcccaatgatcaacatgctgttgaaaatggaagtttgaaaggaattgaaagtagaaatattcaccttacaggacaggtaacacttgcccctaggccctactttaaggatttggctgttccccagtatagaattagagaacgtcagagcttgaagggaattagagagcatctagcccactccactatccctgctcacctctgcctctgctgacagagaagctatggacaagaaaggagaaccgaaccactcagaccaccacagtccttggtggcaggccttacactggaggccacagctctgccttctggtaccttccaccatgtggcatctagctgcaagggaggctgggaatttaggttctgtccttacagtggggaaagagacttaacccaggagtttccccaaatatgggaaatctgatataaatgggcttgcttaataattattgccattcttacaggctaaaataaaaatcagatttcttcactgtgggaatagattttcctgagatgttaagggagctcctgctttgtatgcccttaatcttttcttgtggtaatgttttagggcggttccattaagcacgcaaatggtcatgatatcttttaagggttcctcctgctctatgagtcttcattttcaacacgtgaagaattcagtataacattttccatttttcactaaggctaaacttatacacactgacatatccactttaaagcatcataaaacagcatttgcccttgctctgtgctcaatttttctttccttggaaatgctgagaagtcgttgcctgttcctggtttttgacgttggctaaccacctactgctaaatgagacgaattgaaataatggtctgaaaactgaatcgtatggcattcatgttcacaggctgaccaagccaggagggactggaattgatatcttccatggaaaagatgtctaacaacacaaccgtttgaatcaactcacgtttactaccaggtactcctggtactaaatactataagtagcagttcatttgtttttgtctttcttttttttttctttctttctttccttctttctcttttttttttttttttttttggtcttttctttctcttgtgtaaatataaagctcccactgaaatctacttaagtatcatatctggaacttttctagtaagtagtggaaaatcagtttgtctgaggtcatctttcccataaaaggtgttgaagtcaaaatacaacatagcgatgaatttctcaattaaacattgtattagcgaatcacagaattacaatttgaggaatacacacagaccagagtagtctttggtatgttcaaaggacaaagagaagattggggattttattagaaagagaaatgttatgtattgttttgaaagaaggctcattggcactacagaagcttttgggagctggcaaggtctgatgagtgaggcagcaggtaaaactctagacaagaagcaagacaactcacagcaggtcatttcagcagctctgtgtaaaacaaccttagggtcatagcaagccttttcagcagctgggcttgcagaaaattcacttcttggagctggtgctatatgtccagagtgccccagcacctcgactctgatttagttgaatatttcaagaatgactcaattcgtataatcaactttcacacacgctttttgggcgctggataagattatcagaggagataattacgctacctccagacctttaaaagtgagcctcgtctagatctgatagttatgaggaattctacttgaagcctatgagattaactagacgatttaggacttaggactgagtccctaacactctagtaatctatgattcttaaaagttaatatttgtatttatatttatatttgcagcccatcaataattacattaatgatgaacttggttcttagttttgaagcatcattcatgcatttggtcaatagcatttactgtgcaggcactttgttagcagccggggatacagtggtgaaaaaagtagacatgaagcttcatgaagcttatattatagtgcagcgcccataagcttttcaaaatcttcaattactgtaatagtgtttcttggggccagacgtggtggctcacgcctgtaatctcagcactttgggaggctgaggcaggcagatcgcctgaggtcggaagttcgagaccagcctcatcaaaagtggtgaaaccccatctctactgaaaattccaaaattcgccaggcgtggtgatgcacacttgtaatcccagatactagggagactgaggcaggagaatcgcttgtacctgggaggtggaggttgcagtgagtcgagattgtgccactgtactccagcctgggcgacaagcgagactctgtctcaagaaaaaaaaaaaaaaaaaagtctttcatggaggacttctcatacacgtgcgcacacacacaacacattgaacactttattgtttctgtagtgatggggagacagctaggtgtggagacctgtaataagtcctagtgatagcgagccccagttcccacctgggcagagttagatttatcctgtgtaactgaccaattcggagtgatttggagtgtttctcttcttgatgaggcccaggggccccactgcacttggcctacttctgaaaggagggaaatgctgctctcagtaatcctctgctggggggcgaaggtgggagtgattggattacagttcctttagtagctgcgtggagcttgccatgtgtcagaaaaccttagagtgtagtcatggaatcctcagtgctgacaggaatgcactctttttaaaataagtatgcctctctgtgttgggatatatgatcaattgaagcctctgggcagaatccattgatggaaagcctatatttaaaaacgaacctagtggaggtgtatgatacagaggatatggtacagagaagaagaaagcagtgaggtctcaggtgttggaaaagtcaagtctagacaagaagcaagacaactcacgatgcagacgagatgactggaagagtctggggaactttgggagattaaaggatagagatggtggatgctgggtgatttctacctgtgagcacgattaccagatgtccttgatagtgtgcaatgcccatgccatttccttcaggcgacgctgcagttcagcgtgcaagatactgccacacagttgagatgcagatgaatttggcacatgttcatgttgatgttgcccatgtgattaagcttatatgaagtggtacacacaaaaaaagaaccatttccttccacagatatttatatttagggaaaaatgagaatatttaaagaaaagctgttatgcattgtagaagtaaaattgtagaaggtcttctactatctgcatttacttaaagttaaaagttaatcacttccagcaaggaactgcacatgtggaatgttggtggtcaatgtgttatgttaagaaacttaaaaccctcatttctacaaatagtcatatgatacgactcttcctgaaaactagagttgggacactggtaccctaagcacagcacagagtaccaggatgcctatctgactggacctttgccagctctgggcatttgctcttttgttagtctttggcatttattttattttatttttagaggtagggtctcattctgttgcccaggatggacagcaatggcacagtcatagttcacggcagcctcaacctcccaggctcaagagatcctcctccctcagcctcccaagtagctgagactacaggcatacaccaccatacccagctaatttttaattttttttgtatagatggggtctcactatgttgcccagcctgtcctcaaactcctgggctcaagcaatcctcccaccctggactcccaaagtgctgggattacaggtgtgagtcactgcatccagcccaatctttgacggtttgacagacaaaaaactggcatcctgtggttttgtccgggaggtttttaaatgcctctgcccatagtgtagcagtgactatttgagactaaaatgctttttttaggggaacagtttatttgctattttcttattgggataactttttcagagcagcctccccccatagtaagaaaattaaaggtattcacgatgaaccaccctgatgaaaggaagaagtgcttagagcttccgtgtcccacattctgtgtgggattgggaacctctggcatgggtcccagtgatgatattggacaatcccctggtgtactgctcagtgggaaagtagatatggcagagaatgttacttgacttctaataatcattttccccatcttccttgttaatagaaccactgcatttttaatttggtgacttgcccgattaaatgcaataaagactacatgtcttagccaccattgcagcaaggtgctgtcatatcactaagttctggccaatggttatttttaaaatttaaatacattcatttatttattttaattgatgtataaaaatggcatatgtttattgtgtacaacatgatgttctaaaatgtgcatacattgtgggatgatgaaattgagctaattaacatacgtatgaccttacatacttgttttttgtgatgagaacacttaaaatccagtgatttctaagaatacaatgttattatctatagtcaccatgttgtacaatagatcttctaaacacattccttctgtctagctgaaattttacatcctttgaccaacacttcccaacccctccgcccagcccctggtaaccaccattcgactttttgcttctatagctcaacttttttagattctgcatataaatgagatcatgtagtatttatctttctgtgcctggcttatttcacttggtataatgttctccaagttcatccatgttgtcccagaggacaggattgtcttttttttttttttttttccgagacagagtctcactctgtctcccaggctggagtgcagtggtgtgatctcggcttactgcaaactctgcctcccaggttcgtgctattctcctgcctcagcctcccaagtagctgggactacaggcgcccaccaccacgccaagctaattttgttttttttgttttgttttttttttttgttgttttgtttttttagtagagacagggtttcaccatgttagccaggatggtctccatctcctgacctcatgatctgcccacctctgcctcccaaagtgctgggattacaggcgtgagccaccacgcccggccaggattgtcctcttttttaagactgaataggatccattgtgtatgtgtctttaccacattttctttatctattcatctgtcagcggacacttaggtgaattccatgtcttggctaatatgaataatgctacagtgaatatgagagtacaggtatctcttcaacatattgatcttatttcctttggatacataccctaaagtggaattgctgaatcatatggaagttctgttttttgttgttgttgttgttgttgttgttgttgttgttgttgttgttttgagacagaatctcactctgtcgcttacttaagttggagtgcagtggtgcgatcttggcatcttggctcactgcaatctccacctcctgggttaaagcgatgctcttgccttagcctctgagtagctaggattacaggcatgtgccactgtgcccaggtaatttttgtattttaagtagagacagggttttgccatgtaggctgggctggtctcgaactcctggcatcaagtgatccaactgccttgacctctcaaagttctgggattataagcatgagccaccacacccaacccatatttttaatgttttgaggaacctccctgttgttttccataatggctgtaccaagttaaattcccaccaacagcatgtaagctttctttttctccacattctcaccaaaacttagcgctcatctttttttttttttttttttttttttttttcctgacagagtctcattctgttgcccaggctagaaggcagtggtgtggtcatggctcactgcagcctcaacctcctgggctcaggctttccccccacttcagccacccaagtagctgggatgaccacaggtgcacgccactacacctggctaatttttaatttttatatagagaccaggtctcactatgttgcccaggttggtctctcatctttttgatagtggccgtcctaacaagtatgaggtgatattcattgtagttttaatttgaatttccctgattattagtgccgttgagcagtttttaaatatatctgttggccatttgtagttcttcttttgaaaaatgcctattcaggtcatttgtccattttttatttgcatgattttcttgctgtagagttgtttgaattcctaatctattttggatattaaccccttatcagatacatgatttgcaaatattttcagccatttcataagttctcttcactctgttgattgtttcctttgccatgccaaagattttttagtttgatgcaatcctatttgtctatttttgcctttaggatcatatacgaaacatctttgtgaatgtcatggggtatttcccctatgttttcttccaggagttttacagcttcaggtcttgtattacatgtaagtctttaatccattttgagttgattctttcacacggtgtgagataagggtctcatttcattcctctgcacgtaggtatgcagttttcccaatactatgtattgaggagactgtcccttccccattagccagtgggtattaacgaaagagtgaagtgttacttgtagagtgtacccttaaagagtcaagggcatgcccccttcacccttgctccttctgcggtctagaatgtggacataatggttggggctgcagttatcatcttgcaccatgatgtagctttgggaatgaaaggcagtaaggcagaaacagcaacatatctagagaaaccctatgtccctgacattatagagtgccatgccagccctaggctgcctaccgtggggctttgatgtgagaaagagaactcttacttgagccactgttattttaggttgcctgtcacttgcagtcaaacataatcctaactaatccagtggggaaatggctctaaaaggagctatcatccaccttcctaaatttctaacatttggaagccgcttcttatagcaagtctttttgttacaattacgcagtcacaatggataactatctgcactttactgtggactgtggaaaggtatgaagcacagaggaatgaaaatctcacactcactcactagaatgtacttatactcacatttaccaaaatgccacttacagccttgtgcataataaaataaagtaattactaattagtccgtcacgtgggcatccaaaccatacttgaatagtgacttcagtgatgtgctgagagtcgtactcattagagtagtcatagtttctacaaagggggccttagaaatgggcttacttgaagcatttctctaaatatacaaataataaattggaaaccttctggagtgtgtataatgtatacacaaatgtgtgcattggttgttatactcgaagtagcagaaaacatctgctcctgactttaacacgggaacaaatgaccccagattattagctgctaatagatttttgtagttttagggaaaggagaaaagtaccatagccttctttgttctataaagaatacgtattttatgtattctgtgtttgaaccatctcagcatcagaattgactgtttaatagttgcagttgtttaataatttttttttagttaatgcaaaatattggaagtcatctccaggcttctggcttacagagagtccctgtagagatagcagatcactgcatctgacatcgtcagctgtggttgctcaaacctctggtccaggaagaggcagagtcaaccttttttcccagcagaatgggattctagacatgcagatcagctctcctaaatagtcttagagtcagagtattttaccaccggatgtgaaccctggagatgatctagtattgtccttcaagttgaggaaactgaggtccagtaagtccaacaagacctacccaaggtcacagtggcctgggtggcacagggctggaacccagacctcattgttcttgtcatacagcatgaccttccatttcaaggagactaacaaataccaagtttggcaatgtatccaccctcacttttatttgagaggttacaaagcaaacaaaatgagatcatgtcataagcagttctgtcctaagtgggttaggatttatttcttcttttctacattttttttttaaatcagaaggtatatccccaagaacaggaactaaaggaacagattgcttagacccttgtgactctgccctggtggtggatcattaatggtgtagaaaatgagggcagtgctgggcaggcagtccagggtggggtgcatgcctctttaagagatttatgtggaggtctgagctagggagacagcgcggtggtacatcatcatgcaggcgacatcagagactttcttcttcgcttgggtgcattatcataaaaagtgatttagactggagctgattgatgcaaatggccctatgttctttcctatcattagcggcctctttcagtggccagaggcagtgattaaagctgtcatttggagctgctcattaaagacaagccccagaatagcaagaggaaaaaaggttggagaggcatatatatacatatatgtgtgtgtgtctgtgtgtgtgtgtgtgtgtgtgtgtgtattttttgccttaaaagtgcatcattcttttctagattgagccactgaaatcaaggctgtagagacatttccactgagaatatagaatgctgttttgcaagtaatattagattttcggagtgtcatagtagattctgatgacagcttgcctacatattatgaaaggagatgaggagggtattgtgttaggtgtgttttgttagggattgaccctggtgagaactcattaagtctccctcctcccaggctggggacttcagaggcaggccacaggagagcagaggggagggttgccgagagtggatggcctcagtaagtcccactgtgacagtgttgaccccagggatggacagaagaaggagagcagggaggaggctttttgctgagcccagatgatatagatgcctggatgtcactcagagagaggggttggtgagaggaggcccctaaataggaggggaatggaacaaagcaagatccatagatgcgagaagagaaattaatcagaacatgatccctggctccttggagtcttccagacagggcgacatgactagttaatcactcttgtggtcaaattgggcttcagtgtgcacctgcctaccttttcatcaacatgcattcacatccacttacgcactgatttttagtttagtgtcccagtagtacctaaaagtgacaaaaatcccaagctccaaatgaattacagcatgccccaaatgaaggctagggtagttagtgggtggcggctaaacagggagccagggctgtgaagccagggagggagccatctttgtttcttggaagaaaccagtttgaagtcagagatgagactggctggctaatcctgcacatcctcactggccagttgatgtcttactgcccaaatcccaccaaactttcatacaagctagtctacagctctcctcagaaattcctctgggaaaggaaaaaaataagaaattatcaatttaatttctcagtctaatgaactggtcttatacataaaaatttaaattacttttttttttatgaaagtggggaccaacatcatttatgcaaccaccactgtctccatgacaacgccttggatgtggcagctcatgtgacttcacagtcacaggcccttgaaatgaagcaaaggaaagttttagtttctcttctgtaatttattggactctagggatgctcacgatggtgctaagtggaggtgtgggggtttctttttgctgtggacagtaaatagtgagaaagtggtgaaattattccttcctgcggcagggattggaacttgctgcagagagtgcttccttgtcagcctcagagccagttgacagcttcagaggcgtggcttttgtcctcctctctgctgcacccccacccccacgctggccttcttagcctgggtctggcgcatcagggcctattagtactgatgctgggctgtgatgttcctctcctcggggagcacggcagcagaactgaacaaagtcactggtaatctgtgcttacagcctcccccctggggagaaagcctagccagctggcactctcacgctgagcacattcacttcccctggctggtcggcagcctggcaggggcccagaggctggccggctgcagggctaacctgcaccagcaccccaggcagcccagctcaggatcacacacgcattgttctctgccttccagactggacactggctgaactcacagcttggacggtgtggctcatctgcttaggccttcccagggtagctctctagaaataaaaattacgaacgctggatgaagaacaattggctggctacattgaggttaatacaggaccatttcccctgtcgtctttttcctttcccaggctctaggtcggtgacatcaggaagatttatcatgagttccgtcttctgtagttggaaaggagatggcacatctgccttgggtgatggggtggaagagtgggtggcagggatgagggtggagcaggaaacaccagtagtcctggatgtgtgtgtacttgttagaaatacctgcagggaaaaaagaagcggctggtctttggatccttgctcaggtggaccttccagcacacccattgccagatacaacttctgtcgaactaagacttccctcccatgtaccagaatcttgcataaagggagcagaggcttgagaggcccctctggggaagcaatgtctttagtcactgctctgctcacaaggtgcaggaaaagtctagatttttctcagttgactttcaggcttagaaaaaaaaaacctctagaagatttatggcttgttgttgttgttgttgttgttgttgttgttgttgttggaaaagcatttattctctttaggagccatcacacaccaacatgtatgtggcccttagttggcgtaggtagaggtcaactgtgctgctttcaccaggtatacaggtgtcctaataagagtttggggacagtgcaaaacggcagtgtgttctgttcaaattttttttttgtcttgctctgttgcccaggatagagtgctatggtgcgatcttggctcactgcaaccttcacctcccagaatcaagcgattctccacctcagcctcccgagtagctgagattacaggtgctggccaccttgccgagctcatttttatatttttcagagaggtagggttttgccatgttgcccaggctggtctcgaactccagacctcaagtgatctgcccaccctggcctcccaaattgctgggattacaggcgtgagccaccacatgcagcccagaaacttttcttttagcagagataaaggagggatttctccaaaaagacaacaaaaaaggtgcaaatgaattagcttctgtacatcttcttcagattttccctattctgttagtgagttcactgagaagtggagggaacaagaggaagaatcattgctaacatgaagccagtgctaggccttatgctaaaactcttacacaggggtcttatctccttctgacagtgcagttgggaagcatgctcaccagccccatgtggcaggtgaagcccctggctcagagcctctcagcagctaatagctaccacgtggaggctccaggatctaagcccaagtgccagcctaaagaccccacgctcttctccctggctgagtgctgaggtaccattcggctttaacagctgacggggctgatgcagctgcccggtgacaccatgtgccctgctgtgtactgcagttgccattttgcatttatagtgggattatctgatgctccaagctccacaagggcaaggtcttagtttttacatactgttgagtccccagtgcctgacactgtgctctgcacaccatatgtggtcaatacatacttggcaaatgaaaaagggaatgaacgagtggtcagggttaaaaatcaacgtatctttaaagtaagccaatgtgcttcccaaacccaaagaaattcttctcaaaatagagtgtcgaatagttttttttttttttttttgattggagaaacttgagcatgtttttaggccaagcagtaggaattattagagagggaatgatggcactattgatggaacacggtcccagaggagatctgaagtgacaagattaagagcagagaagaattttcattagcagaaacagggcacttcctccttagagaccagaggtgaagagagaaaaaaaggatccggtagtcatgggctatgtatcacttaggagtgctttcagctgcaagtaatagcttgactagcagtgcctgaaacaattaaggatttatttttttcatgtgatggtaagacagctacagctgggtgaccactgtgttgcttcagtggctcagtggggtaagggccattgtcttcaagactttcttggcctttccctcatgagatgcaccttctagcatcacatttgcattcaagtaaaagtccgtgctatccttgcagacacttacttcgcatgctgcctgctctgctgattgaggaaatggtcaagactaaatgaccactagtccctccttcaggtatgacagtggagtccaacggttagtgggatctgacctccagcgagcttatttctcctatgatgaatataagaagtttgtggccgggctcagtggctcatgcctgtaatcccagcactttgggaggccgaggtgggcggatcatgaggtcaggagatcaagaccatcctggctaacatggtgaaaccccgtttctaccaaaaatacaaaaaaattagctgggcgtggtggcgggcgcctgtagtcccagctactcaggaggctgaggcaggagaatggcatgaaccagggaggcagagcttgcagtgagctgagatcacaccactgcacaccaacctgggcgacagagcgagacactgtctcagagaaaaaaaaaagaagtttgtgagggattcctaagaaagtgaccgagggagaggaggaaggggagagttggaaaagttaaatgattcacttgtaagctactagaactttgttaagtttggggacatcatggttttgtgaaatctactttcgctgaaatttatgtccatttctttgcctccttctctctgcacaccgcctctactcagaaatttaaccatttacacacaacagaaagaattttcctcaagatcgctacttttgcccagtatttctgattgtctttctgcttcacatctccagaaaatgtattccctttaacaacttaacttggagaaggaggaaagaaacctaagcagatatgactccacctaagttttatgaggaaccttcgaaggaaactctgagaaaaatgagtctgtatctttttctccctcttagaccaggcttttgacatctaccagtgtgcacacttaccaattaacagttacgttcttattggttgagagaacaaggcattaacacgtctggtgactgctgcgctggtcccgtgagacctgtagagaggccaagtggttgccgtgggcttttgctacctctttgggcagtcactttgcctgtatgagacgaggaggccggaccctctcagctcctgacatcctctctaacctcctgtgatctggtcaccctgtgggaaagccaaggcagccctggcccctctccagcagtctctccctggagggctcggcctgttgggttttacttagctcgcagtttatgccttcattctcctctgaccctcattaaccaagaggaaaaactaattctagaaaggactccatttccccccatattgtatatttcatatccacagagcatgctgtgccctattgagaattaaactgcgatcactaacctcatctcatttgtgccaggggtcttgttcaaaagctgtttccccagcaaagcagtgccgtgggttaggaccccctcaccccacacacacatgcttggtggagtggttcccatctctttttaatgcctttggcaggggacagacagagagagagaaagagagagagagaaggaaacacagggagagagagagcaagagaaaaaaaagagaaacacaaaagaagaacaagagggaaagaaaagctctcgaacagcagccctgtgttttgttagaacattggcactgcatttatcaggattactggagggagagcagggtttgatcctcttctccactgggagagggaaaagctttattgtaccttttttaacatctcacagttagatcagaacaatacactgtgtatgtacatacacaccatacgtatgtgcctaaggatgatattctacttgggacacaccctgttttcaaagcatggctgaattttttataaaggccagatacagaaagccaccaggctctccctgggtctccctttccagcagaccttccccccctccccatccccttgccggacttggatcagcaggattcactcctgtcaaacaaattagagcatctatgaaatggggctatcgacatgtgtgacttgatctgttttaataggggcccggtgggagtttcctccctgccccactgagctttgtatccttcacggaaaggcagacggggcgcgggaggatgctgtggactttaaccctttgctgccagcaggttgcctgcctcctgcgtgcagccgcttcctttttgtgcctggccattgtctggggagtgcgtgcggcctgccatgctcttcatgcttgttatctcacaggagacaagctcaccccaggagaggaagagagagctgcgttctgaagcagatcttttgatttcctttcttccctctcctctctcaaataattagaagtgctggtcaaggtattaaaaaaaaaaaacagccaaaggggagaaaatatattgtatattttataaccctggcattttgtttttcaagaggtgttgtcgggctgccatttgacccttatgtaataattagcatttgagctgtggcagctagcaagtaggtaagggagaattgcctgtttggaggaaggatccgaccccttttaagtagaagagaagagggaatttgcctctgtcagcatttcagatgcacccccatgctatcactgtctccctggccctctgttcctgactcagttgctaatgacacaatctcccagcgcctgcctccgcccatggctcacccccacacccattcactgttcaggtacttgagtcccagccacagagctggaaggctggacagcagctaagacaagaggcagaggccttgtgcacagtcctgttgccgagaagcgcttagcaccctgccaccctccctgtaccgctctgtaggggtgcagattcccaccgagcccatggccttacctgcacctctcccttaacctgggagtgctgcgggcagaagtcaggacccgctttcttttcttgctcttctttactccttagcacatagcactggtacacctcaatttatagaacagacaccttcctgaaaaactgcatgtaaatgcaatttttgacaggtggaattttgtagctcatagatttacattgtttagagtcagtcgaaatgaagctgaaaacacaatcatattccctgtacttactggtgtaggaacctgagcacacagctcctttcgtaaagtgagaaattctccagcggagcgtgtagccgtaccctggtttacctgttcaaggagtcctatgctgaagaccacatcttatgggcatcggtgtgcagtaggcgctcagtcacaccacgctcatcactgagatgtggaaggaaaggggttggtcgggccctttgctctcctgtgctggtggccaagcccagggcttgggttgtaaaaccacaggcctgactgcttctccttgaattgtcctgaaccttgacccttagcgccctcaggtcgttgtgttgtttggattggtgatttcattaggatttctcacccttttcatttatttcatttaggcccgaggcagaacttctgggagctagctgatcatctgtcttttaattttcctttagggagaagaactccactgggctccatttctccctctcattgcttgctggcactggctccatggcctctttgttgtgtttttgttttgtgttttgttaccgtcccctctggcaccagatcaaggggcagggagggaaactgggacgttttggaggagggttgccaaagagttgttgcaggaaagaggcatggtcagaagaccagttcagcagctgagcagcgacaggagcacttccagttcctccagggcctgagctcagagcggggaggaccatgaggggccgcggtatggcggcggtggggtagggaaagagccaggagaatgaaggaagagcagcagcttatttaatttggaaaaacaagggaaaagctccagtccacatacatctcttctttcttccccttccctgatgctcatgaatagcacgtggaagggttgagtgtttctgccccacagtgtggcttctgccgggagtgggggcacacattccaggcttctgtgctgcctgggtagctccttctcctggcctttcaggtccaggattacagactcaaactgtattcactgtgggggcagggtggggggttctcccctttttttctcccatgtcctagtcatttggtcgctgcaaaatgattacaacatgcaggagatctcttgccacctgaaccatttttaaatcctctcctgagtactaagcccagttctttccaaattatttccagcaactttcgcctcatgtgtaggtttctctggattaatccccagtacaatcttttccatcctcaaaagtcacagacattttagtttttctgatttcatgtcccaccttaggtcagatctttgaggggtgggagggtaggaggtaaggaaccactcctcatgcaggatattagattgagaaacagaaacctacaaaaattcagctccacttatttttaaactgatgatcatgtctgaattagatcagagcaaaagcaaagattaaggaaaaaggcctagtacaaactatagcaaacacagtggaccagtgctgaactttgctagctgttctgggacgctacagctaggcaggcttacgttagtgcatagtcattctctttttttttttttttttttttttttttggagaaatggagtctctgtcgcccaagctggagtgcagtggtgcaatctcagctcactgcaacttccacctcctgggtttaagcagttctcctgcctcagcctcgcgagtaactgggactacaggtgtgcgtcacgacacccggctaattggtgtattttttagtagagaccctgttgggcacggtgctctcaaactcctgacttcaggtgatctgcccgcctcgtcctcccaaagtgctgggattacaggtgtgagccattgcgcctggctagcatagtcattcttaagggcatgttcagaccaagttcctctggctattcttggagcggagatgtcctggcaacttcatttctctgtcgtctcttacaaaaccccctttctccaagttctcttaaaaatgcatctttgacttatattctctcctgcctgaggggcctgccgttgtcctctgttcctggactttcacctcatcctgccgtctagacctggcatctgttttggtcagtgctctggatgttctttaagcagcacattcttgctgagcagaacacggtgttcagccaggttccatagctcccgtcatccccaccgttgctacccaggcccttggttgtcctgcactcccgctaacccccagactttcttagaatcaaaacttcctccagttggatcactgggcttctattccataactccttcatttcctcttgccaagaatgttctttagcaatccgaagttatatttgttattaaatataagacttaaaaaaggcttgtatttttcccctgaaatcagctttaatgaattatgacaaaacttaactcatattgctaaacattatatgtaatgggtgtgctctttcaacttagggaaaaatggatccagaactgttggcagcctttacacgtctttcatcggcctttttctttgtggaccaaaagaaagggccaaacttagccaaaaccattggccgctgatactcttgtgaagactgtgttttattaccactgcaagagttgggggttggccaaaatgatacccagacatttcagatcttaatcacaggtgctgaaaacagagatgtgtttgattctagaccattacaagtgggagttaattaccacatttcaatgaactctccgtgtgccctcctgccatagcaattagcaagagagtggccgcttgtgtgcttgatggtgttttatgaccatggattatataggaattaggaatggcttcgggaagcatttggtcctcacagttatccaataccagcatggcccaaccccagatatgtcaaagccacaactgttgcgtttggcaggcattctacaaaatgtacttggtcaatactaaatagtttcatttagcagaccagtttattcaagtgcctgacaggagtttcctggattctcacctctcctgagaggccttcaagagcatcgctgaaggtttatctacagctagggtaggttatgagtaatgtcttttatgaaactttgcaaaccaactgtcgttctgttcaattcccagaggcagatttttagggttgctgtgtccaatacagtagccactagccacctgtggctatttcagcttaatttagttaccatcaaataaaatttaaacatcagttcctcagtgacacactagccagtttcaagagtacagtggtcactcttgtcacagtggttattgtatcagacgatacagaacatgttaatcatcatagaaagttctggacagtggtgctctagagtctcaacatgtcacgtgttcaggggatcactggatctaaagccattccttatgggaaatgttggctttcttgaaaatacaccagagaccagagaaggtcaccatgtggagaagaggcagccttcactctgccaagaatgctggccaggcttctctgttttatatctcatcacaatgagggccattctggccctccaaaatatggataccaacctttacgcactgtcagaaatgggccacaattcaaagtgttctctgctgtttctgatgaactgccgttctccagctcttccctgaaatggcaaggaaaagtgatgttccctcaagatctgccaagggagatactccctctctctggtaatcgtcgctgtctccttccatcaggttagactaccagggaagtacctacctgaatagcattagcgtatcttcctcactagaattatctttgatagatcatactttaatgtttataccttgggcttattgataattttaaaaaatcaatatgaagataaacttgcatgtgctgtgaaagtcattcattactaaagatgtagaccattcaggtaaagcactgcataatactcaggatgtgctggtctctctggaagaaccgtgggacctccttccaatggagaatgcaaatgatgtgacccactgttttacattttgccccatctgcccagaactccagagttcaactcagcactcatttatattgacttgattagccatggtggttagaaattggctttctctcccttaaccaggtgtttgattttctgttttagttttaataaccttattgtgtatatcttttaatttaattctccttaaattgttttctgaaagaggcgaagtataaacaaatgaatacaaattttattttcaggtccccacatttgatattttctgttttgaggtagtctctatgcaagccccaaccccaggccctggcataaatgacaggagggcccagggacctcctggcagtctcatttttctttcataccctcctgagtatctagcacactgctaaacatatgctgcttagagtgatgtaaggtagagaaacactgtgccccgcgtgggaaggcattacagaataaacttaggaaagagggtcacctctcagatttagtcagatgacaaaggcagcactggcttccctggggtgtagagataggaaagaatttgaataattatcatcattatcatcaccacattcattaaaccccatctgcacatggcactgtgtaagtccccataggtttttttctctgccagtgagagagaattttgtccagcagggaggcgaatcctgagctctccccagctcaccagtttcctcctcgggctgttccactccacagccagcagcctggctcatcactgaggttgagtccattgcctcctatgttcttgggagatctctgtggtccttggcttataatcatctttcacgttctaggactctggactttccctttacagcactcaccacagtagcaattaagaacattgatgcataatgaattagagattctcttgtagtacattttatccaactagggggtcatctctgttctctgcacccccatatctctagaaccccccattatgtgtggtatgtagccaagtgcttgatgcatattcttagcagtaaatagcaggaatgaatgaatgagtgtgtatccaatttgactttagagttatttcccgacttacagccgttgaagttgctgtttcctccacgtgttcaacctttgggattcacacaatacttgacagtcacagctctgccatgggggacatcattacacaaagcactcctcaccagtagtcagatggcacttgatagctacaggcatgtgaatattcttttactgtcaacttttgttgtgatttcacctaaaatgtgataagctccttgaggataaaggctaagtcttacttcttcgtatttctggtaaccgcttgtaccaaacacctgccaagcattgttgattgcacctatgaggaggtgagaaagtgccaggccgtcatgcccctctatacaaacatgtaacagtagactctggttcatcaggagtaaatgacatgatatgtgatagaccacgtacattcgtggctatagataggtgagtaactgtaaccatatccaattgtgagcaaaagtgttttaattggtggttttaaactaatataaaattggctaaatcatcatttttcagctttcgaatcatctgaagacctttttttattttttaatatttagtcttgttttatttatttatttttgagatggaatcttgctctgtcacctaggctggagtgcagtgatgcaatctcagctcactgcaaccttcacctcccaggttcaagcgattctcttgtctcagcctcctgagtagctgggactataggcacacactaccacacccagctaatttttgtatttttagtagagatggggtttcaccatattggtcaggctggtctcgaactcctgacatcaggtgatccacctgcctcggcctcccaaagtgctgggattacaggcgtgagccaccatgcctgctctgaagatcttttttaaagaactgatagatgtccaggtatggtggctcacacctgtgatcccagcaactcgggaggccaaggtgggaggattgcttgagcctaaaagtttgcatccagcctgggcaacatagcaagaccttgtttctaaaaaaaaaaaaaaaaaaaaaaaaaattatgtaaaaacttttttttttcttttaagtactggtaggactggatcctaccacaggaaaaaaataataatctctagggctaggtaccagacaatgaaatatattttttaaataactcactttttaaaaaatttccacttttattttagatttaggggctacatgtgcaggtttgttacatgggtatattttgtgatgctgaggtttggagtatgaatgatctcatcagccaggtactgagcgcagtacccaatagtttttcaacccttcccctcatccttccctctcgcctctcatagaccccaatgtctattgttgccatttttatgtccatgtctacccagtggttagcccccacttacaaatgacagcattcagtatttggttttctcttcctgcgttaattcacttaagataatggcctccagctgcactcgtgttgctgcaaaggacgtgattttgttgctttttctggctgcatagtattccatcgtgtatatgtattacactgtctttatccagtccaccgttgatgggcacctaggttgattctgtgtcttcactcttgtgaatagtgctgtgatgaacagctgagtgcaggtgtcctttatggtagaccatttattttcttttggatatatacccagtaatgggatttctgggtcaaatggtaattctgttttaagttctttgaaaaacctgcaaactgctttccataggcactgaactaatttaccttcccaccagcagtgtataagcattcccttttctctacagccttgccagcatctgttgtttttacttttaataatagccattctgactggtgtgagatgatagcgtattgtgattttgatttgaatttctctgttgactagtgatgttgagcattttttcatgtgttgtatgtcttcttttgaaaagtgtctgtgtgttttacccatttttaatggggttatttgttttgtgcttgttcagttgtttgagttccttatagattctggatattagacctttatcagatgcataatttgcaaatgttttctcccattctgtggattgcctcttttctctgttgatagcttcttttgctgtggagctcagatgtttttaatgtgcaaacatagttgagaactactaacccagtcttcgggtattaatcagcaccagctcattattccatctctgccaacactcaatcacaatttgctctagtttggtaactgccctcgttcagatggagcagagttggaattttacagtgtagggctggcgccagttcctgtcattctccatccaattccgagccaagtgtccagccttagcagggatcccacatgcaatggaaaaagggatgctttgttctcagaatggcttattcatttactagatgtgcatttagcatctgttatgtacacggtggaggaaaagacagttaatttctgtgctgtgcagtcaaggttgggataaacgtggtcaggatgtcatgggagcttcaaagaaaggaaacaggcccctgtgtagagtcatcaaaagagactttctgaaggtgatattaaaaccaagccctgaaagttgcatggaagcttgccgggatactctttccccgtctttcacctggctgatggaagagcatgggcacaggtatggaggtgtgcacgaaggtggctcattgatctataagtagaaatttctataaatagaaattgtggttgaagcacagggcacaagtgtggcaaagcaatgccttggaagccatgcgggcaatgttgagagacagcccaaagaggtaagcagaggccagatcaaaaaaacatgtttatttgccatggtgggacagatttaccatgaagctcttgaagcttaagctgcagggcccctggggaggggccacatgttgggctttgttccttttttaatttgcaaaactatatatatatatacatatatatatagtatatatatatatgtatatatatatatatgtatatgtatatataaattatataagcttcaggctctacaaaaacctggatctgaagcttaaggacctttactttttcctgaaggtaataggagttaatgaagaagggaagagatgtgagttttagctaggattataatttatcattgaaactgagatactttgagagtaaaagaccatgctattaatagtatacctacatccctccccctcccccccaaaaaatccagtaatcagaactttccttggcaaaaagcagtgtatgaagactttgattttagcccacttggttggtaatcttaagatgcagttacaggaggttgagactggagcagggagaccagttaggatgctgttacattcaaaggagatgatcagggccagaattaagacagcattaaagaaactgaagacaagcagttgggatcctcaggatgggaaagcacgggtaaacgggcaggagacctctgggcgccatttctgaaccgggcagctgggtagatagatggcggtgtcttcccttggcctgatggaacagggagggggtggcagacattggggggaagtggggattccagctgaatgtaaggatgtcgggaagtgcctgtggaagagccaagagaggacgagtttagtaagtactgaggttctggtggcaggttcatatccatcgcggggcagtcgggtttgctgtactgccacagatgccaaccgtctgcagatgccacttggagatggaaaccacctaatgcaagaagaggtcaggtagcagcatggatggctcagtgcaaaccaacccttctatttaaaacacagctaggccaggcatggtggctcacgcctgtaagcctagcattttgggaaaccaaggtgggaggatcacctgagctcaagagtttgagaccagcttggccaacagggtgaaacctcgtctctactaaaaatacaaaaaattagccaggcgtggtggcaggcatctgtaatctcagctactcaggaggctaaggcatgagaatctgctgaaccggggaggccaaggctgccgtgagctgagatcgtgccactgcactccagcctgggcgacaaagcgagactccatctcaaaaaaagggaagaaaaaaaaaaagcccacagctaaaagccagcccttctgtggtcatagcagccaacatacatggtagggcctgaatccatccccttgccacctcccttagcagcctgaatagaggcaggcgcgtctcagatcatggcagctggtgactgacggagcccctgattctctgagctgaccatataagctgaccctggatttacttaaagttaattttcatcatcatcagcctcgctgtctcaccagccccacctaattctaaatttacctaaggttctttttttttttcttttttaaaagctttaggtctatattttggacagaagatggtcttttagctcctgatctcatacttaaataaaaatgctctcatattctccttgatatatttgcctattggatttgtttaatgaaatatggatttataccataaatattggagtcgtgtagtccatatttcaattaatggatcatttatatgtcatgctaactttgtaattactgaaatgtaggaatagagtggattgaaatgaatttctgttcatctttccattcctgcccccatccaggcatgtctgagcagcttggatcgcaaaagggcaagatttacacatggggtttgcagaggaaaggggtagggggctcggaaaggcggcctcctctgcgtgtgccaggagagctctatattgcagtgtgctttctgggttcacctaggcagcgttacacagctgtcctcagaggagcggaaagctgggctctggctggagggcccggtcatcaatatgctgacaggccttcatcatcattttcatctcggttgtaaagcacagcctattttccctctttgccaaatctctgctccaaatgtacataactatagatttctgactgagccctgctgccaggaatcaaccagaaagcttcaccagacctctaagacagaggacaagtaaattgtgttctcggctcccgtgaacggggcctgtcactttaactggtttcttctcaggcagtgggtacagcccaggacacccttagtgaacttgccactgcccctggttttctttctctctctttcctgctcttcctctcctgcctgctgtttgctgaccagaaaaatctggctggagaggcccatgcagtgagtgaacatcacatacataattctatcagaatatatccaagggtggggaatcattgttctcggaactagctgagctgaagcccgagcagaaatactaaagtcagtcgtgcctttgagctgcctctaacagcgccctttagagacccatttcatacaaaatttgaagcctgtgtttattgcccattaaagcaacctttattttatggcaaatgttgcagtaattgccttttacgaagagcactttgtaacacacatgcacagttgaaagaaaaccactctggtattgtctatcgggacttaatggcgcaattaattttactccatctgttcctgagactttaaaggaaaatggattttttttttgagcgtactttaatgaagaagataaagcggcccggctggtgtcccacaggctcggcgcagtaagttcagattattgctcagtctgtcagaatgggctgcttccctcagcagcagccacagccagcaacccgctctggcccctcgccgcgccattcctgatgacaaactgccagccagctcccacaaaagcacgattaaaatgtcagcacaggatgacgaaggggccaagagggtcctcagagacaaactgtgttcagtgtgagttaatactttacagcagggctggggcccggcttgctgcgggctggccgggctgctggctcgccttgaagagaacaccagggcaggggctggcgactggcggcggggaagcatgtgcacatgcgtgtctgcactgctgtgtgcgtgtcgggcatgctgctctgtgcgggaagaggctcgtttcagaggaagcgtccaatgggccgttcaggttagggagttccgagactctccatgatttctgaaccgtgggggacggggtggtcgcaacctagaatgtgggctggagagcgctgtcccagtggtggccccgaggccacaggttctgtcccagatgttctcagcaccattttagcgacaagggcagctatgaaaatggcccagctgcagaaagtcattcctcacgaagaaatgggtgtgcagagaatacagtcagcaccatttatagccccatgtccccaaccttagcctttgcacggttggctgggccacagcaaggggctcagcagcaaaatatccttgaatcaatactgctgcttgacagcatctccagccccgcgcccgtgtgtgctaacttgctagggggcagggcgcactctgccgctttggcttagttctcccatgtcccttgattcagtggtgtgaccagaggggagactgcctgtggtgaaaaggacaaggagatttgcatctctggcctcctgtggagacccgatctgccgtcctggtgggcagcaggtgtgagcgcctgccattgtccctaatggttattacaagtgataagcaggacaaatgtgaagtcatctctcctgctggcaggtcagagggggctggatttagagcccctaggagactaggaaattagatggtcagtacccaccgtggaggttgtagcaactccaggctccagagatcctggacaggggtgattccagatgtagactcatacttgaaaggcatcaagagcatccattgttaggacggaggtacagcagtaattagtgcagagtgctaatagaggaacagaaggtaggaaggaggccccagcgaaaggcagccgggggattcggtttcctctaggtccagaaccgtgggctgagatttcacaaaggagaagtgagggaagccctgctggtttctcattaagccccttggcctttgctcattcttcgtgggctccaatggagggtggaccctgtggcttcttcactttgctctctgacctcttcagccccttctctgctctcttctctgcttgtcctaggactgctgtctgcaggcacagatgccccccgttgagccacgcaggtttctgtgaatctgaggttctaactccctgctgccactctctggctcccacgtcttccctgcctgacactcccctcccttccatccatcaccctcctctctcctaagagtgctctctgaatcttattgcctttttatgtctctcttgggttcttcctcctgccctctccctgagcatggttttccttttttggagcatcccacagctcatgccattaatggagtcataatagccacggttggcttttcccgagcaaacagacttctgtgggctgcagaggacacagacccccactggtggctcgaaacacccctcctgcaggcagttcacaggctggacctttaaggttcccaccagccaggccacacattggttcctccatatttgtacaaaaagatgtgagccaggagcagtaggcaaagccctctaccttggggggaaaaaaaaaagttggtctggaggataatggaaattcgcatggggcgagggctctgagagcagcatccatgccccatggggtagagggcaagacagtgactgtccgggggccttttcagggtcgcttggtgaaacacaccctatatgaatgtgttgggagaacctaaagcagaagggagagacatagagcaaaatcagagcgagggtccccccacctcttcactctggctctgggaagagactgctggaggattctccacagcacagctcactcacccatccatttgctcaccaagtacttactaagcttctctccaggtagctaaagacacagaacatgggccaggtgcagtggctcacgcctgtaagcccagcactttgggaagccgaggtaggtggtgaagtcaggagttcgagaccagcctggccaacatggtgaaacctgtctctactaaaaatacaaaaattatccgggtgtggtggtggtcatctgtaatcccagctgctcgggaggctgaggcaggagaatcacttgaaccctggaggcggaggttgcagtgagctgagatcccaccactgcactctagcctgggccacagagcaagactccgtctcaaaaaaaaaaaaaaaaaaaggacagaacacatggaatgcctgatccttgattgggccgtaggtctagattttttaaaagcttgtatataggatatttgaggggacagctggggaaatttgaatgtgaaccgtctattaaataatgcctcaattgaaatttctgggtgtggtaatgttcttactctaggaaataatacactttcctaaattttaagatggtttaggaaaaagaaatacacaaagaaacacacattcacagataaatgtggagaaatgttcatcattgtcggatgctggtgaagggtgatggctgtgtcaggattattctaggtactagatccatatcatcagcattgattctgggtactagatgtatatcatcagtgctgattctaggtactagatccatatcatcagtgctgattctaggtactagatccatatcatcagtgctgattctaggtacgagaaacatcagtgaacaaaaccagcaaaaggtccctgcccttgtggtgctcaccttctagtggtgagaagagacaaggagaattaatgagtaaaatgggatctgttggaagggggttgggagtgctggagtgggaaggcgccatttgaaataggaggacaggaggcatctccctgtgaaaggggcgtgtgagccaagacttaaagggaacaggaggctgtgcgctgcagagcactccaggcagagggagaagccagcacaaagaacctgggtatagtgtgcctggggcttttatccagaatgtcgagtgtcctgtgaattccactttccagcgatccacctttcatcccccatttgctgttcggcgggcctagccttggaaatgaccttgcatgcttgaggacaccctttggatttaagctgcacgggctggacctgtggcagccctctagagtgcatgcattcagagctgttggcctggctccgtcacctttgtgattcggtacatcattctctccacacacaagatctttcctgccccagtgtcaagggcgataaccacgatgaggagaaagcacgaggctaggaataagaccatgtgcatatggacccacatcctccatcccatctgattcagcggggtgacctcagccaaccacttggcttttcttagcctcagcgttcctcctctgtaaaatgggagtaggtgcaacttcctcccagaaaggttaagaagatgagatgaaagtgagcaaaggcagattgtgagctgcacattgcggaaactgttagctctctagacattcttggtctctgagcagcttagtgttgggggctggggttagcagacatggtccttggttgctggtctcctgctgagtaaccggagccttgaagtgagtcacagagccttataccccttcaccatctgtaaagagggagtcaccacttagtgacgtctgctgtgtcatccacctctgagagtgggattccaagaaccagagtaccgagtgccttatgaattccactctgcgaaaaaattaatagtaccttggggtctttcatgccacgttagaggttggcttctgctgcaggctagccaggcattgctcgacagggcatcttgtttgagctcctcttcatgtctgaaccacaaaggcacaagccctttcaaggacatgacattcagatgtgcctctcctgtgtgtcctctcaactttgtgacttacccccttggctgccagtgaggccttctgaacattgtgaaggcagagagggctttatagcaatcaggctactctttggaaattgtgctgccttttagtggagataggttagctcctgcaaatcctcgaggccatggtgagcagccagcccctccccacagcccgtcccaggccttgaagggcttcatctgaggacccgaaggcctgggttcctaagctctccctgagcaccatttgggcaagtcatacacagagagggagaggaaacgagttttaggagttcttagctgggttgttcccatctctaggtggcctggcagtgggaaggagagaggtgagaagagcattgtttatcaggtactgtcagaggactattcctggaaaacactgctgaatcttctagaaggggtgatttgtgttctttccatattggcaggttttcatttccctgcttaacatgactaaggactgcaggacctgtgcatgctgttaggtaactctggccccaagatggaccctaggagagactttgacacacaattgatgatgtgccaggtggatagaagtggaagtgcagagcacccaggcactttcagccaattagtctggaaatgacatccaagaggcagagaggtactggctgtgctgcctccattcgtgtgtttgcctctggagcaaaatcaggctgggctgctctctgtagggatcatgccaaggatttggcagctctctggaagaaggagtgatttggccaagtagatgtgggcctcttatgtctccggcaggtcttcagactcaaattcttaagagaccaaatgacatcttgcctaggctatcaggcagcaccattgcagagaggcatggatgaagctgtgtcacgaggagtggcccgggcaaggtgtgagatggtggcttcacttcctttcacaaactctaaggcagcatgttctccaggtgtggtccctcaccagcagcatcgccacctgggaactaaatcagaaactctgggagtggggcccagagagctgtgttgcagccagtcctctaggtgatgttggtgtgctttcagaaccactactctaagcaataccttcatattgaccactattaagacagatcacttccactgacagagtagttgcttatggcagccatggcaaggtggaaaccgtaggtatcaggagacctgcgttcaagtccccctcttatggatacattttgtgggaccttagaaaaaacacggaacttttttgagccagtttattaatttataaagtgggaataatcatacatcatctccgtggattttgtgaggattaagttaaattgatggcctacaaaaatacatttttttttttttttgagacagagtctcactctgtctcccaggctggagtgcagttgtgtgatcatagcttactgcagcctcaaactcctgggctcaagggatcctcccacctcagcctccccaagatctgagactacaggcatgcactaccatgcccaagtaattttttttttaagagatgggggtcttgctatgttgcccaggctagtcttgaactcgtggcctcaagtgatcctcccaccttagccttccaaagtgctgggattataggcgtgagccaccacacctgtccagaaagtgctttttaacttccagtattttgcatgtaagatggcattgttatgtttatcgaacacctgccagtttccaggcaaacgtgatccttatgtgttatgtcaggtaggttgtctttttatccccaattttacacaagataaaactgaggctcaggctttaaacttggtagagcaggacatttagcctggttcagcctgattccatgttggccttggagtttcactgggagtccatgttcttaaccattatgctttttaaaagttctcatcctggcttaaccatcatctgtgacactttcaaaaatactgagattgaggccactggtttgatgtggggctcggccactgagtttctttaaaaccttcctggatgtttggaatatgtagatagggttgaaaccatagtacgttgcgtatataccaccacccttccatctcagaacagatgctgcaaatccagagttacataaattcaaagtaagggacacagagctttagcaaaccatgggcagtcaataagtgcttattagatttgtgaattaagaagttttaaaatagcattcactgcaattttaataaatcagataacaggtgttcattttgggcaagtcgaagagtccaggaaactggaggaatataatgttacccacaatttgagaacccctttttgtgaggcctcaggaggtaggaagaggtaggcgttgttcttcccacattagagcaagaaaagcagccccaggaaggctcagcgatttccctaagtaggggtattttgggggttggtttttatagatggtgggcaaggggataatagtgtaaattttgtactttgagcttttgggtaaataggcagattctgaaaccattgtgttgtatctactgattactataaaggcacagatccaggctctttgttaactccctggcagactgagtgcttccaagtgcaatttccctcccctcctttctttagaaattacctcgagctgcaaagtgagttgggctcaggttggcatgcaggcattttccattccaagggacaggaagtggctgtgaatcttgtaacctgtattccttctttgagagtctatagagttggaaataaagacacagaagtctcctgagtgccctggcagtgcttccctggatgaagggtttggggagaacttctagagagccagactttcattaccgaaactccccatctttctccccaaacccaaagtagcagtgagacctgctgatcaccttcatgtaaaagaatagtaataatccccccgaatcctgtccaaaccacagaaccctgcaggttttggacgagtcccgccataaaaccactttcccatgacttcccgaacagtaaaccccagcttgggtaccagggaatggcgctttcagtttttaatggactgcagctgaagcaagttcaaaagtgcgaggattgtaaacttgagagcaactctgcagatgccgcacaccgtggcagaatgattcagggggccaaactttgcctcatcaagtcagagaattttctgcaaatgaacttttcaagaattatgccgtcgttggcattacagtattacacacatgcctgttcccgatcactcactggaacttattttgtagttaacctccataaaggactgtgcgagcgagcacaggcctgtcacacacacattatttagaagcccttattattattttattgccagtccttgacagctgaggaaaagccaagcgctttaatctttttttccctttagtttacagtgtaagagctgcatgtaagatggatttgattaatatgtaacagagatgcaattctctgtaaaatgtgctgtactttagcaccctggaaaacaaactgcatcacaatggcttaaatctcggtccattgtattatatagacatcataaataatagagagcaggcagatattgctgcaggcttcatctgcataacacatctgagctctctataatgtgttcaacttgtcacttttagtacagaagagaggtaataaagctaacagctgactaacacacatcagccctacttctacttccaggggggtgaatgctcattaagccatcttagccctgacttttaaaatccataactcttacaaatgtaaaaaagttgccgcaaaagattaagcgcataatatatgtcaaagtataatgttttatgcatctcccccaactaccactccccgctgccgccgccaccaccacaccaaaagtctggtttcttttatagccttctcactagacgaaagaaaataaaaaatctggttctcagataaaaccaaatgaaatattattttcccagcatcactaagggactaggtaattgcttttgagtttgaagcacatgagctgaccccaagaaggttgaagattgaaacctttccccctctcctctaagaccagctcaaaggaaacagggagcttgggcccaggagtttgagaccagcctgggcaacataggaacaccctatctttacccaccaataaataagccaggcaggtgtgtggtgcgtgcctgtggtctcagctactgggggggtggtgaggcaggaggattgcttaacctgggaggttgaggctgcagtgagctatgattacaccaccgcactccagcctgggtgatagagcgagaccctgtctcaaaaaaaaaaaaaaaaaaaatagggaatcagtcatccccactgggaccttgcagacaggccactagatcagtcttagctgccttaagcacgcccttacatttacttgcctcagtttccctattggaaaccagaagggagtaaacccctccattttctttctgaggggactataaggccgagttcagcactgcttgtcatttacttgcctcagtttccctatcagaagtcagaagagaggaaacccctccattccctctctgagaggactacaaggctgagttcagcactgcttgtgcaatcacagttgacagaggtttcagagtctctgttgtgctcttctgattagcagtcttgtgttttagaggaaaatttgaaaacattacggtatgtcattttctgtaatgatggctgagcctttttagggattaaggctgtcaggcagaaaagagaaaaggatgtttatactcttaactcagagcagatttaatcctatgggatgcattttggtgggctaggggagcattgtggtctctttctcggggaggctgtgatgtatacagtacacggatgtgcatgtctcatgacattcatctctttcgaaaatatactttagaacatttctcttggagctcctaagaaaaataaatggttggtggtggcccggatggtaggaagacaggttaggatgaaacaggaaatttttcttagtagttataaatctctcaaggggaaaagttagagccccaacacttgactcatttagaacaagttgaaccaacctctgaaaaataaactcacagggggaaaaaaaaaaaaaaaaaaaaaccataaaaaatcctgcatgaggtcaggggactggcatgctaggctaatagaaactggaagtcagcgcagacatcccaggatgcactagaataacatactgtttacttctgtgattagctcagaactaatggtgtgtgtgtgtgtgtgtgtgtaagtgtgtaagagaccaactgagacacaggggctttcattgataccagtggtgcttgtgggcggggattgaaagacggcttggttcccttggctaggagtgtgggcctagaacagtaacacacttttccactggtcacaatgacagtttgtttttggagaaagccatcattaaactgtgatgtgggccgtagcactgctacctcagaattctgttgctgtccaccaggcaggccctgaaagctcagctttccgttgctagagcccacgccgtcatcccttcttgcccatattcctgcagcagcttccagtctcatctcccagcctcccgggcttctgatctcccccgttccacatggcagccagtgtggccacatcatttctcacctcccaggcctgccattcaaagtcatccacagttgcttctttttctctctcattggtctaatccctcacccagcttccagccacactagtccacccggctccagccatgctggtccattagatgtttctagttatgctcagtactttcccatctgcattcaagctgttcctctggctcagaacactctttatctttgtaaattgaagtcctattcccatctttgaagagtcaccatgaaccctacccttcaggaagactcactagacccctacttgaaataggtctttcgccaggcgcggtggctcatgcctgtaatcccagcactttgggaggccaaggcaggcggatcacaaggtcaggagatcaagaccatcctggctaacacggtgaaaccccatctctactaaaaatacaaaaaaaaaatagccgggcatggcggtcagcacctgtagtcccagctactcgggagactgaggcaggagaatggcgtgaacccgggaggcagagcttgcagtgagcggagatcgcaccactgcactccagcctgggcaacagagcgagactccatctcaaaaaaaagaaaaaagaaataggtctttcataaatctgtgagctcaccagttaactaagttaactaaggtaatcaggttccttagttcagaacacactgtcatcctggatccatgggaggccgcccttagttttccccactatcctggcctgctccccaattctcagacacccagcctcatgtgcctgatatgtaaccttgtcaagtagatagtgttcttctgtgtgggtgttttgtttacataagtgatgatatgctataaatcttagttctgtttcttgtcactccacataacatttttagaatctggccttgctggtggttgcacatgtgtttgttgcttctcaataataccgaatattctatagtgcacattcccctagtatcagatagctaaggttgccctcaacttctcccatgaaattagcaccacaatcaagcacacactgtcaccataaccatccttgtaatgtgtctatttatggaattctgcaatctacctgcggtgcatgtaagttctaatttccagatgtccttgcccacacttgctgttattcacctttctagcttttgccatcttgatagtataaagtattataaggagttgaccatttttctgagtttctgatttcttgttgatttgcatttttggtataatttaactatgggtcattggctattattttggacactcaagtatcttcttcaaatctgttgcccattagctaactgtagtgaccttgatgttaagagatctttacttttgctatagtgaaacaaatacatattttggcctcacttaatgttctgggagtatctggtttaataagtctttttctatccttcgtgcacagatatcatttcacgtgttcttttattagcttcatagttttatttttcacttttaggtctttgtttcaccccataatactttgtaccatttcctagagtttgccttgaatttatttccaattgtgtcctcaaccaggtgtaaagtcttagaagaactatgttgcattctccatccaagcctcagctttgccgagccttaacctgactgacctacttccctgtgtccatactgatgacattccttccctacattctcagtggaagacatatcactcctcttgtctcaggtcaactttttgtgcatctgagtatctccttccattccatcctcctcagtgacttctcttctgtcttctaagctctctcgctgtcagcacataaacatgcgtgtcaactccccttctcgtgcatcttcctctggctccttgtctcttgaccccattcacttgtcattccttcacagcaactggctttgcctctgcccgttgatggcactgacccatcctcatagaagcttcagtcatttccacttgccaggtgaaggagtccctgcattcatcaggcccaccctgaagggcatgtgaaatgttacgaccacccttcttgatttttgattttttaaatgtttttggttttgtgatattcccgtctcctcatcttcattttgtctctctaacaattctcagatcattttcagtgattcctcagcctccacagattccaagattatgtccactctgatggctctcgccacttttgcatgacaatgatactggactatgtctccatcccaggtcttgcccttagcttcggacccatattttccatagccaacaagatggccaggtgtcttgtggacacggaacattaaaaatgtgcctaatctaggccaggcgtggtggctcacgcccgtaatcccagcactctgggaggccgaggtgggcagatcatgaagtcaagagatcgagaccatcctggccaacagggtgaaaccccgtctctactaaaaatacaaaaattagctgggcatggtggtgcgtgcctgtaatcccagctacccaggaggctgcaggaggagaatcgcttgaacctaggaggctgaggttgcagtgagctgggattacgccactgcactccagtctggcaacagagcgagactccgtctaaaaaaaataaaataaagtaaaagtgtgacaaacctaagttatctttcctcaacctctgtgtcctctgctgattttctgatttttaagtggatcctaagacaggtctctgggaatttttctagactgccttttaaatcaaagaaacaaactttattatcatgtactaattgaatgtatcatctctgatctctctctttccccaaccctgtccaaacctgttcctgtattcccatacccacaattcagccagttaccaaagccccacatcagcaagtctccccagactcttcctttgctgagtgctatgtattttacctctcaaaagactggctcagtccatccctccctttccaccaagacagcctctgctatgacgtcctggctcgccccacctaccatatctgtgctgcagtagacctggggtacggcctgagaatttgctttcctgaccagttccttggtgatgctgaggctgctggtctagacgacactttgggaactactgcttccgttgatttttcccatccatcaattggctcattcaacaagtagttattgagtaccagtgtcaagttctggaattcaacaatgaagaaaacaaggtcatctattgaaaaggttgtggagggaacaaacaaagaataaattcatctataatgtgatgtgtaagtgatacatgctaacaatggttagcatttataaatggttgaagggacggaggagtggtgatggagagggagtcgtcagggaagacttgctatttaggaaaattttgagcagatacctagagggaagagcattccaaacagagggaactgcacgttcttgtgctttaaccatcctaaaacacagtcccgactctatcacttccctcgcggggtcaacagcagccacgtttgactgccattctgcgctctccacgaactgtctcccacacccttttccacacatcgtctcgcacccagactgacctgacttctcccaggtctctctgctgacatttcacttgcctcccctggggcacttatttgtgctattcacccccacccctcctaccttccagcaaatgcccttcttgtgtgtttgcctcatgccagatcctgtaattcattcaacgtttgcttccatttccacctcctccatgaagccttccagaatcatcccctttgaaagtgccctcttcctcctcattccagaaacatttatccccagaagtgctgcataacccttgtggcatctcacccttgtatattcctcacctggcccaactctgtagtccagcaaatgcgtagtagaccttgggtgaaggatggcccagaagtgtttctcctgctccttgacctctccaagaggcgggcctctggtatttcctaaacgctggtggctttactgttgaatcagagcaaaaggagaaaggaaaggccatggcctaaaatggagtattggaatgatctctgggtttctctgtttatcccagctttctttctgtgctattaccaagataattgagttggaaatactagtagcatttccttcatcttccttcaggctcacaagcgttcttcacccaaagggagggagattaattgacttcttttatcttccattcaaatgaggctttcatgtgaatcgctcccaccctcccgccccctcagccctcccaacctcccctcattcattaggagctggacatgaaaaggagagcatctaaaactctgcagagtccctggatctccccagacccctctcttccctcattccccgccaaacatttctgacctggcatcacaacagttcacgtgagaagtgtcacggtggggcagagcagatccaaccggaagctgcaccagccactgaactctctccacaccaccagatggtctggtgctgcagcagcctttcagaattaataactctccctccagaggggcagcttcattcaggaaccgtttcacattttccagctaagtgtggttttttcccatagagttttctggccgctctgttctgggcagaccatggggcctgctcacgaaggcaagagatgtatcttgccttccctccacctttctttgcctttggcttctgacagcgcagcttttaatctggaaattatggtaacttgtatgtgcattttgagagtatatcattgctgcatttaattaacggttattagtgttagcgtactgtgctgtattctatgtcacaaatcatcaagtctcccagagcagttacagcaattaagaactccatcacaccttctgtatagtcatttggtacttttccaggtcttttcaaaactggaaattactaatcaaatcatttctgctgtgtgcctcagtatcgtttattccattcctaatgatgtgcgacttttttttctttggccgttaacagaggcatccgtgcgtctaacccatttcacaccaccgtcatgctttagcgaggcgataatgaacttgcagaaggaaatgcaggctttggttctcttttcagagcagtgtctttcctctcctgctgttgggtgattgaattttgaaactgtaaaatgcatcgacagacctacaaacctgacttgccagagccacagccatcacagttgagcttcaattcagagctcagtgcgactcctgcctgatcaatttgtcatccctctaaatggaaactaattacttcccagggaaagattgcaggcaaatatcagcctttgcatcagcagccctctgcagtgaggttaaggcagagtccatggggtttcaccagaggggccatttccctctctgcctccgtcatgtcaggaagaatttttattatttagagcagcagtgagcttgccgtcacatccactaaggtcagccgtcaagcgtgcatctcacttaataggtcacctggacggtcccaagtcaaatgtcagaggccattcaactgccaggttgcaacaaaaacaccctggcaggcttttgatggtgtttagatggggatgagccagcccgctggaggggagcccaccgcctctggccccccaaggggattctctttttctttatgcccaagaacactgccctggaagcatccccggaatgactgaatcattgccatttgtgcggcatcgaacagactgtgccgctgacagctgtaggcaagattgactccgatgcagtgccaggagatctaggccatgcaaggcggctgctcaaggcccgctctagtgcgagggccctggctcagggcagcagggctggcccagaagctggggccaggaccgggccagccagctcagaggctgttgaacaatctgatcagaggagggccttgccagttccctacctttgcccattttggatgctgttctgctctggccttgctgctcatcattccaggctggctgagcagtttcaaactcagggctgatcctgccacctctgtgtctgggctgagctgcaaggtctttagcccagcattgctcagtcttggacattctcccagcagaagtcagacaagacccaggagagaagtttgttttgttcagcagctgattggatccgctcactgttgacttgtgttccatgttggagaatgcgttctggtccccctgagctgatataaaggagcccaaactcaaatctgtgcccattccacgtttcccctctactccaggatggagagtttttcctctcattcttatccacacagcgaaaaacactagacacagtgagaaacgctggacggctctgggggccgtgggagctgggatgagcactgaacttctctaggcctcagcccacttcgctctgcaagccctgaatgtgcctggacaagatgaccggtaaaggccattccagctctctgtgctttgtagcctgagtccctgtgaggagtggtttgctttgaaacacaatataatccagaaaaaacagctatcttaacttggccagctctgcttttaagcaagaaataaagtgatggtttcttgaaaatgatgctggcctttataatgccttctcccttaatctccccacaaactgagacaaggcatcctgggtcacaccctggctcgtctcctgtgtgatgtgttttctgggacttgcactttggtaaccagaggagactgccaactgggtatcatacctgtctctcaacccctcttctgcccaccaccctctctcagcctccctattccctgaagctagcatgccagggaggcaggtggcatacgtggtacaaggactgcatgcgcacattttggaatgaaacagtggcctttctttggaactcagaccatccagtgtgctctggctaaagacaggattgtagatctaagaagtccattgtactgattagtttcatctcagtttaagccactgacctaccaagagtatccattcaggaaatgtcaccccatggcctgatgtagtggtaggagactggaaatagctgagtgatgacggcatgtacactcagcattgcttagccttgggcaggtaccgaacctttctttgcctcggtttctcatttataacatgggaataatgatagtacttacctcttcagggttctggtgagggttccatgaactaaaacacatgaagagtctagaattgttcctgtgctgtcctaggcccaggatgaatgtgagctgctgtggttacagctagtgtcatagtactccgcccccctccaccaccagactaccacagtttcctgcattctgtgatgccgtcagctcactgagtcaccttcaccaacacctttcacgcctctggacttcagctttctcatctgcagcacgagggagaggaatgggctgaggcttgccatggtgctttcagggacaggcgtgggagcatctgtggtgagtttgcagttctgtgttgtatatgtctgcaccaatgagagtttcatgatcttgaatttatacattcatatcatgaagcacaacctagtagcatgtttagatgtagaaacacgatataaaaacaaaacagaatttgttttggtttttggttttttgttttgtttcgttttgttttttgagacagtctcactttgtcacccaggctggagtgcagtggcgtaatcttggctcactgcgacctccgcctccccctttcaagcaattctcctgtctcagcctcccaagtagctgggattgcaggcatgcactaccacgctcagctaatttttttttaaatttttggtagagacagggcttcaccatgttggccaagctggtctcgaactccttacctcaaatgatctgcctgccttggcctcctaaaatgctgagattacagatatgagccaccgcgcccagccctggaaggaacctttgttaagagttcatagtaacagggtgctaaaatgagtttattaaaataatcccagtagatgaaagattaggagatctcttttgaggaaattagagagtttagatctgttttgaaattagggaatgccttttcctattgacctaagtctctgattatatatgtcaacctcagcttacggaaagaagctgacatgtcaaaataagaagaataggctggatatggtggctcatgcctgtaatcccagcactttggaggctgaggcaggtggattgctttagctcagaagtttgagacctttagattagaagtttgagacctttagattagaagtttgagaccagcctgggcaacatcacgaaaccccatggagcatgtctgtggtctcagctacttgggtgtttgaggtggaaggattactggaccgcaggaggtggaggtggcaatgagccaagatcatgcccctgcactctggcctggcagagtgagaccctgtctcaaaaaaaataaaaaagtaagatgaataaacaatggttaatagaaacataagtggtgggacatgggggtcaggatttaatctcagagtgtcccagtggtgatttattttatttatttatttatttatttatttatttatttatttattttttgagacggagtctcgcactgtcacccgggctggagtgcagtagtgcgatcttggcttgctgcagcctctgcctcctgggttcaaacgattttcttgcctcagcctcccaagcagccaggattacaggtgcccaccaccatgcccagctaattttttgtatttttagtagagatgggccttcaccatgttggccaggctggtcttgaattctggacctcgtgattcacccgcctcggtgtccaaagtgctgggattataggcgtgagccaccgcacccggccccagtggtgattttgtaggtcagcagagatgatctgtgtgccacatttccttgtagcttaacaatgggcctcaatcatgtggtgcttgggttcttagaatgtggacagccaagacattccagccacaagtaacagaacaaaatggcttcaaccatggcaggggggcgggtgtgagtagtgtttctaaatgggactggttaagtattttggggcacggattggcttctctgccattctcttagctttctcctcatgatttcaagatggccgccatagttatcagacactatttcctcaggaagccacactcacagacaggaaggaaaggtgttcttcctcacgtacctctttttatcaggaggaaattcttttctagagaccccatagcaaacttcccctcaggtttcactggccagaactgggttacataccgtctcctaaaacagtcaccgtccaagaataatgggattgccaagggtggcctgagcctcctgtaacaggggaagaccacctgcccacagcatggcgccatgcagtacctgaacaaaacctgggttcagtgaacttgagggctcttgcctgggcaaccaacagggtctgtctgggaccttaaagtcactgattctgacttagcacttaggaatcaggcatgtggtttaatctctctgaatgtcaaagaatgtgagctggtcaagagcagatctagaactagaatctcttttctcttactgtgactctcatccccactcagctttcttcctggaattatttttactttcaaatgtgtgaagtcagacatacaacaattgtgcatttcacttgaaactagtatctcgttgattgctaccaagaatgttgtttaaaattgagaagtacatacatttacctctacatatctccagtgaacttctgtgaccattaactgtcaattttatcagattcattttacacgcaaagcaaacacatctacacccttgtctcaagaagtttccaggctagatgaaaaaactgttcctgtacccatgacagttagacataaattaatagtgccaactaattgattgatgaccagagttcaaatcaggggaagaaaggatcacgttgagggcatggctgaggcccaagagaatgatttcaatggacagagaggaaggaggaggaagtccgaatgggatgaagataatgttgatagtaatgatcaacattacagttatgagcacttgctgatatgagtaatgatcaactacagttattgagcacttgctgtttgagataaagttctaagcactttacatgtcttaacttatttcatcctcacaaaagctattatgagatgggattattgtcttctcattatttccgctatatagataaggatcatgacatacaaagaagttaaataaggtacccagtgccctagagttagtaaatggtaaagctggacccaggtaatgtggcttcatagcctgccccctctctggtgctcagcctcatttactgtagcaaactcacgaaactgggaaacccagggttttgtgaggcgacttctgtacaggtgttccttaacttacattggggttacatcccgataaacccttcatacgtggaaaatattttaagtcaaaaatgcatttaatacacttaacctactgagcattgtagcttagcccagccccccttaaacacgctcaaaacacttacattagcctaccatcgggcagaatcaactaacataagcctgtttcataataaagtgttgaggatctcatgtaatttattgaatactgtactgaaagtgaaaaacaagatggttgtatgggtacctgaagtgcagtttctactgagtgcatattgctttcataccagcataaagtcgaaaaatcgtaagctgagccatcggaagttagggaccatctgtatgttgatttagctgaagggaggatttataggcaaaatagtgagataaaaggtagggaaagttttcactgaattcagaagtatttggaactggggctggtcatctggatcccagaaaacactggcaaacacacgcacagaaatgcacagaaaaagaataccccaacattgaacaccaaaggccctcagactttggcgcctccattttgaaggtgagggatgtttctatgtgtctgtaagcagtgaagacatcaccggattatgatcacatcatacattgcacacgccgtcacggttgcacgttgctctaatcccatgtatattactgtgtctatttggaaagctgcaagagccatttatttatgagtgactaagtggtagttgactgccttcaactcctcatgttttacaaagtaggaatccacagagaatagcagtaaccaatacaccaaaccaccttcattttgagatgaatactgagaagtctttcattactctgcagtataaagtgtttactaaacagaattaagccacagcataataccctgccttccttcttctctatttgattcgtcctacttaacaccagcaaaagtacttctgccattttttttttagggttagacaatttatgccatttaaagtgtaaaaatggaatttacttggcagttagagggaaaagaattgacattatctagacacaaggagttcatgggtataaagtctcagatcatcatttctgctaaagatcaagtacctaagtaaatgtaaaagactacactgagagagacatccccagttggaaaatgtgccaagtcatagaaaattgtggtagccctgaattttcaagaatggttttggccagatgtggtggcgtgcgcctgtagtctcagctactcgagaggctgaggcaggaggatcatttgaacccaggagtttgagttcagcctgggcaacatagcaagaccctgtgtcttacttttttaaaaaaagaatggttttattggtgtattttgattattgtaaactaattgtagactctaatttactcttggatattgagatctgttttgactcttggcaatggtggtgttttttggtgattggttgatgttttatctggcctgatatccagattcttttttgtaatgtacatactctttcctgatatcgtttatatgacaatcctcccctccccttatttaaatagaggtttaaaagtttaacaagcccaggtgtggtggctcatgcctataatcccagcactttgggaggtcaagagaggaggatcacttgagcccaggaattcaagaccagcctgggcaacataggaagactctatctctacaaaaaaataaaaaatcaaccaggcatggtggtacacacctgcagtcctacctactcaggaggctgagacaggaggattgctttcgaggctgcatgagctatgatcatgccactgcactccagcttgggcaatagagtgagaccttgtctcaaaaaaaaattaataaccctatctctcatacttttatattttctctttggaaacctaaccctcaatatatttcaaatgccttgtaaatggcttttgaagaatgcttcacactggatacctgggttctaatcctaattctaatacttaactgtgaacacggatgaagtatgtcagtctctgtgatccttacgccctagacttcccttccccaagtggtttgccaccattaccaattaaaatcctatacctctctgagatccagttcaaatgctacttcttgaagctctttttgatactgctttctcactttcctcaagaggccattatgtcctgtccttttgaagggcatgtttctcaaaagccaaggttgtacctttagtttcttgagagccaaggttgcatctttagtatcttcagtcatctttgcaccccagaatgtttagcacagagcttgcccatgatggctactcaaatgctgaaaggatgaatgactaaataaatcttgagatcagttgtatttttttctttaaaataactggctacagtcactggctctcaaccctggtgttgggctcatggggacattgtaatcagttgtaagcgggttgaagtgatttgttatgaatgattgttaggttttggaagtttgcaaactatgtactgtttgtataaattagaatgtttcccttcagtaatattctttaatgataatatcatcatcctgcagtgttaatacttcagtgtgacactctcccttgcattgtgatttgtcttaaatggaagaaaaaaggatggacttagagtcaggacccaggaaattgtatgttaatccacagcctatcttttctgtgccaaagcccataataagccagaaatcactgctaatggttatggaactatggaaatatgatagtcctctactactgtacgagatgtgggggccttgtcaaaatgaacattatctgtcaatttagagaaaagaataaccattactctaaaccaggggtcagcaaacttttacagtaaaggtctagatagtaaatatttgagggcttttgagggccatacagtctctgtagcaactacccaacttcgctattgtaatgcaaaaaagctattgtaatacataaatggatggacatcactatgttccaataaaactttatttacaaaaataagacggaggtcacattgggcttaatgagctgctctaagccatagagtacatgggaatgtaaaccatactgcttattttttttaattgtattaatggcatttattctacttcctttgtaatagctaaggagttcctgcaaagaaagaaaaattaggggttagtaaatttgttacttatttgcaagaatattcagtatatatttcagggttaatattctctagactttctcagcataagaaatgagatgaaattctgttgatgttgtaaataccactattgaggctaattcgtgaaagaaaggtgactacggtatttgatgaagtaccttgtcttccaagaagtttgcttttgtggtattatctgtggcacgttattttctgtcttggtactttctctcagtgggatatttaggctctactttcctgcttggcacttttgttaataatgactttaaaaatcctcacttctctttttaaattgctgcatggagtaatagcctctctccttgacagtcaaaaggccaagaagtgcaactatgtgaaataaacttttaaaacaaggccccaagtgcactgcaagttgacttgaaataattagtccctggagtttggacacccacaaagtatctttcggaactcggattcagaaatgtctcagtgacagcctgtggcgggaagccatcacagcagcagggcccattgctcttgggacatcccacactgtagagttactttggcagtgcctggaagcagcggcccctgcccacatggcttttccactgtctcacagccaagaaccatgacaggcccctcagaacttgggccctctccagtccttgagccagtgttcaccctcacaggaagagtgtttccctgttttatcagcaagtaacagaaaacccagatgactgcagcttacaaagtaaagacatttctctcccattacaagaagcgtggagaaagcatgttgtagaggctcagtgttgtcacagaggacctaggacccttccaccttcctatgctgccatctcagtgttgggggatgacttccctcatggatgcaagaaggttactgaaacgccaagtataatgtcactacctcatgtggcaccgtgctttacggtaagggggtgagcataaacagaggggattccaagtgctgttctgtttgagcaggggacatttttcccagaagcccctggtggttttcttcttgggacctgcttgcttgaacagcatcacctgcctctggcataggggaaagagattgccgttattggcttagaccaatcactaccttccctggcactggacacatgccacatcagggttctactggaagacaagagaaagggatggctactgggggagcagccaacccaggtctgccacacccagctgaaccccctagacagtggtcagagcaccttttgctttgaccgaggaatcccaagccttgccaagaatctatggccagtcctctgggattattgccagcagttttttctgtttgttgatcatctgcagacacctgattccctgtcagtgctttttctgtttgacaggacttcttgatgcccaccaggatcgagcttgccgagtcttttggatgttgtgtgttatccacccagccaagtctttttggggaatatttatggaaatatttatatataaataaataatatttatatttccagaggtgctctgtacctctgtctatcccttttgggggataggtaagccactttggggccctcaatcccttaacaaaaataatttcatttttcttagtaaaatcatataatgtctgcatttttcctttgcagtacagaaatacatgattggtattttttaatagattacttttctggaacagatattattttgaaaatttaaaataaatttgaagagttctcttctaccagtcttaatttcatggaatagtttaaatattatttaattccatggtctaaactattggctcttattgtctttttttttaatattatgtatataaaattaggaactcatttaagaacagcaagaattgatttaatctgtgagatgccaaatggagctaatcctgaaatactttctatctgtagagattgatagtttacaaagcactttcatacatattatttcagtactttccataactattatctgcatttgacggatgaagaaataagggtataagagctgaggtgacttggccaggatcctaccagccttcacagagttggcactggagcctgggccttcacagcctgcctctgagacactgtcctgtttctagcacttaagttccagtgtctatggcagcatgcaataggattacaggaggacatcgtagccacagataacccggccatgttacctgttcatttcaacctctgcgactaggcccagatttctcaggacatttccttccccatgagctgaattttaacatgcaaatgtcactcacatcctacaagctaaggtgtatgggtttatgctgggactaggtcatatctgtattttaaaaatcccagaacaaccccagcagtggttttagagatgaggaagagaggagacagaacaagttctgctggttaccctgctcttggacttctcaggtgcttcattaatatcatctctgatggcattttgatgccatttttctgatggcattttgcagcttgcctcaagtgtcccttctggttttctaatgtaggacaaagcccaaggatgagtggctgcggttgccagtcagcattctctgcagatgtctttggtgtgtgtagctggggttaacccgccgtcttaatgtctgcctactcggttttgcatgcaaggatacattatacaagaaaattccatcgagatcatgtacaagtaaaatcagcttattttttccgaagaggcaggggagctacttcttagcagagtgagctgtagagtctctctggaatgcaaaacacagacctttgtattagaagtgaaatatttagatagggatcattatggagctctttttatagcaaggcaggcctgaaaaacagagagagagctgggaaaggaagcacaaaggaggtaataatatctgattagctaagcagctggataactgaaggagaatttgttaaaaacctatcaagacatcaaagctagatgtgagttgctctgttagcccaggccacttgtggagccatctctggaatattactgagcatctaatttgctgctattttttcccctagcgtcactccttcactaagggatctgagctgtaacctgacctgtagctgtcatcagggctttttttccatccctgtcatggcatgggatcccagtatggagaagcttagttggtattcaagtcatccgcatcgtacttgaccacgtgtgaacaagtaacctcatgtttctggggacaggcagggagaaacttgagaacttgatccccttgggggcccttggaggattgcttccaccaagccctgggttttgcaagtgactcgtttcccaatctatggcacatccaagcctctttggttttctttttccctgttcacacggatatatttgaggcaccatactctatctgcccaagaaaggaagaggggcaaggaaaaccgtgtaagtcatgcttgtttaaatattttggcttctgccaaagcagatatgagaacaattggactataatgagagttttccattggcctcaactatcctggacagttgaacgccaagcctagtttgataggtacctactatggacctggtggagctccttcttaaaattagacagtgtgtactggccagaatgtctcagcttgcagcctgaggatgattatgctgatcctggaggccctggggaactgtctagggcactaggggtgcctgtgctaacagcaaaagaccactcccccccaacaccacacttgcacatgcctcatgcacagaggaagtaggtgccaggtcttttcagagaagagcttcaaagccctgctgccacctacgagagcctttgatccatctctcggctgaatccagcccctcacggggctgatccgctttgaaaccagagccagcagcccctctacaactccctctgagttacctcacacagacaagagcacaggcttctggggggcttctttttatcttccctaaattgcgagaggtacttctttcagcgttgtcctataggattcttaagaactgccggggagatgtcttagggccaacacaaagaattgcaaacaacagcccagtgtcttggaaactttctctacagtttagtacggataaaccacatgcagatagaaaataggaagaaaaggaaattcatggtaagcctgcgtattttcttatttcgggtgcgaggggagtggagaaatccgtcatggataaaatccaactttaatgacagtctgaagccctgaagcacagacatattgcagagctaatgtattattttgtttttgtttattctgcagaaatggggaaatttcattttttagtagaattacaagctccccttttactattcacaagccctaacatgcatggcatcctgagccagagagccttccgtgattttaataccagcttctttgtgaatctaaactggttttccagtccactccctggcgggccacgggggttgttggagtggtgttacacatacttagctttctttgggtgcttgaccaccgcctgttctcaggggggacaaggagccttgctgtgggcattaccagtgggaggtaggcatggacagtgaggttcggcacctgacctctgaattcccgcggcccttgcaggatatcacgcccacgactggcggtcctcagcctgaactgcgcgttggaatcacctgggaagctttaaacatactaaacctgggccctgctaaatgacacccgtattctgatataatgggtctgggtgtggcctggatattaagatttctgactttcccctcccacctaggtgattccatgtgcggtccgggctgagagccactgtcccgcagcctcatcatacagcttgcctaggttccacggctgtgtcacttcctggccatgtgaccccgggcatgttaactgagctcagcttccttgtttgtaacataggggaatcactgcaagattcattacacctatctcctagagattattgcaggggttcaagttatggacattactgggaggataccatggaccagacactgttgtgggacctggaactgttatggctgggaaaaaaagagatcagagtccctgcctttgtggcgcttctttattttctagtcatggatatggtggataaacaaacaaacttgcatatacatagtgtaatgtcaaatcgtgggcagtactgtgaagggaaaatatggccaaggggaagggtggcaagtggcaggagagagtgcatgcacataaagggcacatgcagtcccgggctgtcagaaatgcaggcaactggctgggcatggtggctcatgcctgtaatctcagcacttttgggaggccaaggcaggtggatcatttgaggtctggagttcaagaccagcctggccaacatggtgaaaccccatctctactaaaaatacaaaaattagccaggcatggtgatgcatgcctgtagtcccagctactctggaggctgaggcaggagaatcacttgaaaccaggaggcagaggttgcagtgagccaagactgcaccactgtactccagcctgagcaagagagtgagactctgtctcaaaaaaaaaaagaaaagaaaaaaaggaaagaaagaaagaaatgcaggcaactgtgcatggcatccttggcagggtctacagtgttgcagttcctaccacttcaccctgggtcaatgagatctcagtgtgatgtctttctctaaacagattatagacactccctcaagacagacctcagactctgtgcaagcccagggcccggtcgccatctgtgtgatgaatccaggcacctagctccgtgcacagcttctcaaagtgagcgtagatttggagagaagaagggataatcagatgtttcatttacccaggtacaacagatacgtattgaaggcctgcagatggcaagacctggttcaagcacaatggggcagaatatgaggaaggcccaccccttcctttgtctcttcccccacagccactacagttccttccaccagtgtcaaccaccaccgtggcagagcatttcccgtgagacaggccgcaggctacatacattatgtgcatcctgtcgtcatgtcctcaccaggggaagtagctgttggtttattcaaccccattttacatgggaaggctctggggctttgtcatgctatcgtttgttcatgtcaccccaggccacacagcagctaagttggaaagtgtttgctgttagcctgcattgttgtccttccatgagggacctaacgtgcatactaaaggcctactatgtgccagagcctggcatttcaccattaagtcactgaatccccataacactgtgcagatggaaccttctcagctttcctgaccatcccttatcttgggctagccctcatgacacatgtcacaccctgcaattaccttctttattcatttgttgacttttatttgtctttctcccctactagaacatcagcacagacagtggactgttatcattcactccagagccggcatttgaatggagattagctggcattctagatgccgcctaattacctgacaggagaaagaagaccaggacagaagcagctgaaattccaggcagaacataggttgtttcagaagaaacacaaactctccctggcggcgtctgaggccatcttcttcaggaaggtgtttcttggatgcacttcaaagcgtagggggcttcacaggtagaattaggttgcaggaatgaggggaaggtagtcccctggaaaatgtgaaaatgagggttgagatgcaggcaggaaaattcaggaggactgttgagtgaatagtcgctccctgtggcaggtgaccagggtgggaggagggtggcagtgtgaggacatcctgaaacacacacgctttggactcagatcttgctgttgtagctccgctacctgatcagtctgtgaccttgggcaacttccttagctttatctgtgaaatgggaataatagtgtcttcccttcagtgagaaccaaatgagacagtactttctgtacatcgaatgctggtgtagagcagttagaacaaatctgtagatctgtagatcgatgctggtgtagagcagttagaacaaatctgtagatctgtagatcgatgctggtgtagagcagttagaacaaatgagtctggggaggtggacccaggctgtgttgcacgagcagggcctctgcacaggcccagcactgacctcaggtttaaccttttacttgaggtacgggaatggctttttggatactgttgtttgaagaaaaaaaaaaggtcatgaataaaacttagaatactaacaaccacccagaaagccagtcccatctctgcccagtaacgccttcctttcctgcaggaaggttggaaccttccacagttccaccaggtattggcctggtggaccagattgaaagggtgagcagacaatgggggggcagacacctgaagccagagatgtgggccaggtgggggctgtcggcccttcccacaggcccaggcagctgcgctgacacagctgtccctttgaaagttggccccgagtgggaagctctgcattattctcccagcccactgcagaatgccttctgcccattgcacagtggcagcgtgctttgggcagcttgatgctggggctgcatggagggcctcagaaaagtaggtagactcgtaagacgggctttatcctggaacaggcaccaccaccctgccctttccagagccaagctatggacatgggtcctggagaggcagaaatgtcttaagggaaggaaagggaaatcctaattactacctgggaaacagtcctcatttccaaacccagcaggtgacctgcaggataatgtgtgggcagtgattcattagaagctgtaatccccagtgttcaagcgagagttgtaactgtatctagggcctgagagagagaaacgggcttcatgaattactcctctggcaccgttgcctacatacctaggcctgtagcaatttatcccaaatgaggaaataataatgtcattttcctccagcctttccctgggaggaagttctctaatagagggtaggcaggtgttaagaagaaatctttctgggccacacctcattacaagattgggataagtgagctctttttcagcttctgcctctcctgtccttgccttgtcagcagcagggttgggagttaggcacagggcatggtgggaaagaagtcttgctgggttctcagtcattgcagttggttgttttaggtaaagtaaattgatgttgtgtttcttttccctaaatattgactgttgaacctagttgtggaagaaaagatacctgtattttgctcttattacttgctattcactgctactcttcatctggaggtcactagcaatttttaaacacttatccccattttacagatagaagatagtaagttctatggaggaatgaaaggcctttttacagagtaactgaggttccatatgttgaactagaataaagtttaagctcctgaccaggtgcgatggctcacgcctgtaatcccagcactttgggaggccgaggcaggcggatcacttgaggccaggagtttgagaccagcctggccaacatgatgaaaccccgtctctactaaaaatacaaaaattagccaggcatggtggtacacacctgtaatcccagctacttggaaggctgaggcaggagaattgcttgaattctgccaggaggcagagattgcagcaagctgagatcatgcaactacactccagcctgggcaacagcgggactctgtcttttaaaaaagaaaagaaaagaataaagtgagctcctatagcaagtggagccccacaggaagaaaggcttcaatggaacggacgttgacttctcgtccatccgacagtcttatggatcttgctggttggccctgactccccttacagtgtcttagggaccccgttcttttcatctcgtggctttgccatctcgtaagcctcttactttctatatccacccaatcatggggaggaagactcagaattgacacttagcacctctgccattgccaagaactagtcatgtgaccttaactactagtgaaaggcaggggtggcccggaaatggagtccttcaccagacagttgcttacctgagacaacatgcatgtacctgtgaaatgcgtatactgtagaaggatcatgagtttggcacataattagtggataataatcactaccacgtctcagaatgagtgtcagataattagtggaccataatcactaccacatctcagaatgagtgtatttgctaatagaaatgtggttttggcttaagtcacattgtcagtggtgaatgcagcctaaaattgaactcaaatacccaggccatagttgttttctgactccaccaaggcagaaatgaaattgttgagtttgagagtaagtagatggggccagccaaagcaagatggacagaatgacattcctttactgtccttattgacaatttatggttcatgcaatagaaaagaatcttaaaagtctctctttaatatacaagaagagaaagacccctggaaacttgtcttttcatcattcgaaacctaccttatcccttcagtcaaatgcagtggtacctgtaaagctcacacacagttttgcatcaaatgattatgtggtcagccatgtaataagtggattcaaagaaacgtatatttaaggtggccacttgcccctggggtaaatggcagctgttggactctgtgggattttgtgttgttgttgaacttgtaaagtgatgaaacctcataatttctctcctcttttagttccctctctgtctgagcagctgtactgaagtttgtcaaacatgcccattagctttcacatgtaaagatggcctttttatattcaaattttagtaatatattatttaatcattaggcagtttactaagggtatatttgtggccattgttctttctgaatgcctaatcactaaaggaaaacattttggaaacaagcactttcttccagaaactgtggtttccaggagagagagtcactgggaagattgggaagccatcagtggcatggcacagagacaccatggatgctgctgctagaccagccctgacccagtagtaaggcctagccaaggacacattgaactccttgaaattgctgatatttggtcaggcacggtgccccgcgcctgtaatcccaacaccttgggaggccgagctgggaggtttgcttgaggacaggaggtcaaggccagcctgggcaacatagcaagatccccgtctctaccaaaaatataaaaaattagccaggcgtagtgatgcacacctgtagtcctagctactcaggaggctgaggcagaaggatcgcttgagcccaagaattgaaggttgtgttgagctctgattgcaccactgcactccagcctgagcgacagagagagaccctgtctcaaaagaaagagaaaaaaaaatgcttatattcaacaatttttgtccttccaaacaacaatttcatcatattcaaactaatacaaaactggcttcccaaggaggtgtttgtttataaggctacagggcaccattttcctaccacttctaacattgtcttataggaggttctctgaaatgagaaatgcagatcttttttttcttcttctcctaagacagggtctcgttctgttgcccaggttggagtgcagtggtgtgatcatggctcactatagcctcaacctcctgggcgtaagtgatcctcccgcctcagtctcctgagtagccgagactacaggcacacatcaccatgaccagctgtttatttatttatctatttatctatttatttatttatttatttatttatttttgtagaggtagaatctcactgtgttgatcagccttgtctgaagtcctgggctcaagtgatcttcccgcctcggcctcccaaagtattgggattacaggcatgagccaccacacccaggcagaaacacaaatctttagtgaggtagcattccatttagctacagaagcactcagcatgcagttgacctttaaacaactcgggtttgaaatgcatggattttagatgtggggctttttaaaccaaacttggatcaaaaatatggtattcacaggatacaaaaaccacatatacagagggctgaatttttgtatgcatgtattctgccgggccaactgtgggacttgagtatgcacagattttactatactcaagtgtcctggaaccaattcttcacatataccaagggacaactgtaatgtgaacacaaacccataaacagtgcaacattaccagctttcccaggatgcatgtggctgacagaggagtcagcatcaagaagggctccactggcggctgggggcctctgagctggagcttactgacaagtggaagatgcccagatgataaggtgccgtgacagattgtggtggtagcattgtgagctggttgacaacacagaactctggaatcagatggcctggattcaaatcctggactcaccccttattggctgtgtgagctaaggcaagttacttgccctctctgtgccccaatttcttcatctgcaaaatgggaataatgataatggcattatggtttactgaaaggattaaaagagttaatatgtttaagtacttggaacagcatccagcacgacactaagtgatatggaggtatttgctatttttatacagagcttagtggcatgaagaagttagacaagcaatgaggaattcaaggtggtgtcctggagtagaagagaaatcggttctggaagggagacttagattacaggacagacagagatttgggtgttgtttccacgactggaagaaggcgacagttggcaaatacccacctatgtagtgatgtccagcagaaactgtcctgagacccatctaactttgtcattccactatctctctgtctctgtgctttctcctgcccttcttcctgtctcaaaacctctagtccttttaattataggaaatgttcacgttttcccaccacatttttttttatatatgtctgggtgtaggaaatttctgtgcacccccaaggacacctgcagctcctctctctttgagtttggtgtatgccgggagggtagtcagaaaacagccatagccccctcctttgcaactgtttctgctatagtctttttgatggtgcaaggtgtaccctagggctgattgtgttcctgggagctggaagctgttactgcagggttaaatcagcaacaggagagcatcactcccagcaacctcagaaagaatagagaatgatgttgttgaagggagcagggagctgtgttcctagtgccgtcttcttaaaaaaaaaaaaaaaaaaagtttccttcccccctcttctctctgcctttccacaacacaccttgtactaaatacatttttcagacctgactttgtgcaaacacagtgttgttcggcaagcattaaaaggcaatttagtactcaaaggattaaaagctcatgttaaattgaagactacacttggcataaacattaaaaattgacagaacaccccgcacattaactgcaccagggcttcgtaattagcatttaaaagtaaaacatcatttccttactgtttcctacttactcatttataatgcatttattataatacagatgtgagcaagaggctttctcccatcatcagcagatgaaaaatatacctgtgctgagaaagaaactgggatttattaatccagcccaaaaagcaaaaccaataaagaaatctctcactgggctgatttgagagattcaaactaccccttggaagattgacacaaggcccccaaagaaatcgccttcacacttcttttccttttcttagcctttcactaacaaatactgggaagaaaatccaagtaagcttcagccaggcacacacttgcgtttaaaactgatcaactggcaggttaccaaaggaatgtggaaaagagcttgttggcccattgctgatgcttcttcaaaactttggtaagactgggatccaattttctaactcagggaaattctgctgacttaacacagatggctgaatttgtaaatgaggacacctgttcatgacacctttgggctcctgcttaaaatcagggtttagtttttagcattaccaaatttgtaaaatctgaatgcagtccaaatctgattttatgttcttcctccagagttaatcctaaatgtgccaccattgcggtctttggacctaattctcggccccttcttagtatggtaggtagtaattcccaaactctagcatgcatcacgatcactgggggtctccctaaaatgcacattctgcctgagcaggtccagggtggagcatgagattctgcatttcttttttcacctaggctggatggagtgcagtggcacaatctcagctcactgcagcctccacctcctgcgtccaagtggttgtcctgcctcagcctcccacgtaggtgggactttaggtgtgtgccaccacgcccaactaatttttgtacttttagtagagatgggtttcaccatgttggctaggctggtcttgaactccggacctcagatgatctgcctgcgtcagcctcccaaagtgctgggattacaggcatgagccaccgcgcccagccagattctgcatttctaaaaagctcccaggcagtgccagtgctgctggccccaggaccacatctttgagtggcaacgttgcacagaagactctcatcagttatcagtcagtggattcagctcatcaaatgtgaaagacccccaaattgccagctccctgtggtaaacccatggcaatgactaagacaaccaaacacagtgcttgccctgaatgaacttattctagaaatatctgagaccttgttatctttctcaggcctctcctactggacctcgtttgtcatgtgtgattgcgaacacctttccctgatgttatctagagatcctgacaggcatgttctgctaaaacagacctcccaggctgtccccaagtggcctcaaattccccagctggggcaccttaagtttatcacgttaggcagttaacaggacaaatataatttctgggccacaaggccagtctgggtgaacgcatgacataagggtgttaaaagtggaggggaattccgaaaatagactttactcttgtcagaatggtgccaggggctggcccagcctgtggaatgcctcagcgctagagggcttgggcagtaaggcacgcttccctggggagggtggtggtggctggggagaggagagccaggttcccaagaaagtaatttggcacctgctctatggcaatcccttacaggcgaagagagaaaaaggaggctttgggacagataggggaattttctgatacaagcagtccccttgtattttcttttcattgtcgtaatgatttgtaaaattccagaaatgtattcgtgcccctacatgacttgaaaatgccgctgtctcactaagagccatgggctaaaacacacccgaacagcggtcagaagtgaggctcgctgtctctgaggtgaggacaacagcctggattcccgagtcaggctcacatctaagcctggcagggcctggagggcggcaacgtgtggtttgcaggttcgttcattaccccagtgttttttatgggaagatgcttgggtgtgtttgtgggaacagaaccctgattttaattacatcccttctggttattcagattatagacttctaaggatcttgtttctctggctttcttctgccctacagagggacacaagggttcagcagagaaagtgcctgtgctctgtgttgacacatagaagcagagaattttagagcagaaagggacttcagtgcatttagtccagcaccctcgaattataggtgagggaactgaggctcagagagattgaaatgacctgcctaaggtcacacaagtaggattaaaacccaggtctcgtaaacctctctattttgtacatcatgctgtctgcacataattatttcttttcagatatttaataaaagtcacaatcagagttagtccatttcttgtctctcctttgagagttgaagtcatcgtgtgaatagccataattactgcattttctgtgcgtttcttatttgattcttctttggcacaagggctctgaggatgcttcagcattgtaccaggcagaaaaacgaacacaattagcagattcaaacagatgcacatcgcatctcacacaggttaatagggaatgtgcctttctaaagcgaaggagccagggttaaacagggcatggaagaattcaaagggtaaaatgaatatgattcacatacttgtagagtggccaaggagggccttattttttactcttcaacaaaacagaggtttggcgctaaaaccacaaagtaacgttcactgtaggcgcacctcaggcacaccccgtccctgctacgctacacgctgcctggtctctgtagactgttactgtctgaggacctcctctcacaaacacttatttaacaatggcactttggctttttaatattttatttgatttctgttttatggtatttttaattgaaccctgttttaattgccttttctgcacaccaagagcctaggtggggaaggaaggcttacaaatgaaatgattattgttattacttcctttctttctgcagcgtcttagtcaaattataaattgattccatccacatattagccccgatcctcatatgcatgtgtcagaaaacagaaagtgttgaataaggaggctgaaaattttcatctagctgagaataagatttgtcagcattattacagagtgaggaaaggaaattggggctaagttcttgccgtcgagttgagcagagtacttggttccgggtgacacagcccacaggtgggcaaggtttcataaactgagagctagaagtggcctagaaaagacatttagtcgctccctcgtgtccagtcatagcccagggcagacatagtttatcctgcacagccttggctgacacctccataaataaggggaccttcctttacagcttttcagagtctcaagggcagctacacagttgcccttaggataaaagaataaacaaccctcatccccttaaacttctgcccctctttacccagtgcccccgcatcctgttttttggaatttgacctatttatgcccaggcactgactgcagggttgacagtagccaccctgaaggggccttggtagggagtaacaaaacaggcggggtgcggtggctcacgcatgtagtcccagcattttgggaggccgaggcgggcggatcacttgaggtcaggagttcaagaccagcctggccaacatggtgaaatcccatctctaataaaaatacaaaaattagctaggtgtggtggcgcacgcctgtgatcccagctactcgggaggctgaggcaggataattgcttgaacctggtggggggatggggacacggaggtagcagtgagccaggattgcaccactgcactccagcctgggtgacagagcgagactccgtctcaaaaaacaaacaaacaaaaacaaacaacaaaaacccagatctggcacacacagaaatggcttctggccttattacacccgctgcctccccagctgggtattcagtgggcagccactcatagccttcataaaatgacttagatttgatgcttgaaatgaaagcttgtcaatcctgggtaaccgcttgaagaaaggaacattatcccttaaaaggatagccctagcccctagaatatctttctcaccttgggacttgctaaaatagaattccttatttcaaaggcagtaaaatgttttgagttcctactatgtgtagtatgctaggctaggcactacaggccaagcaaggcaaataaaactagcctctttccctattcccctgcatttcagaaaagacaacacatttcaaggctctgctttgcaagagaccaggcaccacagtttcctcctatcagcctgggcatggcaagtaataaccccccctatgaatgaagaggttgctgtgttcaaagaggttaataaagtgtccaagaccgtacagtgtcagtgaggcagggaagaaatctgaaagctggtccctggctaacctgtctctttgcgttgtcaacctggaaggaagtgtcagatggtttggcgcagagctctgtccttgggcctggcctgtttgcaacctttgcttaggtgaaaagtgagagtggaagacactagattggaagaagacaatcaggataccaaaaaatatcccagcagactgaggaccagaacgaaagccgtggcagtgagagtggaagggaggaaatgagcaagaggcacagggaagacagagcagcctgaggattcggtgaactgggtttggagttagggagggtgatggcctaggtaagaccactgacaatcaggaggaaatcccaatgaggtcatctgtagattgttgatttttaaagtgccaatggacaatcagtgccacactccaccaaatgagttggagatacagaagtgtaaggcaggaggagctggagtcttgggagccccctacttggaaattacagcggaagctggggaactggtgagagagagtcccccacttcctcctttctagacattgaagggatacctgaagaatctcaatattaaaggataagagaatccaaagaaggcaatattacttgagaaacaagagaataataatagtattttgtcacggaagcccagtaacaaagggagagacagtctgccacttctgcagaaagagacagaaagggccactgtgtttgttaattaggaggtcctcggccagagacctgctaagctcataaacgttaaaggccagagttactctctttgggtggaacagctccagggcagctgaatagataatagtcactgcttcctcgaaagggtaggacacatgatttctttttctttttttttctttttttgagacggaatctcactctgtcaccaggctggagtgtaatggcgcaatctcagctcgctgcaacctccacctcccaggttcaagcagttctcctgcctcagcctcccaagtagctggaactacaggtgcccgccaccacacccagctcaattttgtatttttagtagagacggggtttcaccatgttggccaggatggtctcaatctcctgacctcgtgatctgcctgcctcggcctcccaaagtgctgggattagaggtgtgagccaccatgtccggccaggacacgtgattttaaaagcaggggaagctcccatgctagtcaaaacaaccctactacagcattcatagaagaataagatagaaaatgagatgggagcttagctggtgacacagcagggcacttgcttgcttgggtcagcccagcctagaaagtcagaggtgacggcactaatcagacttcagggaaactggctggctggtaacacaaatcttctgtttacagtgaggagtataaccagcaacccaacgcgagtgacctacatgcagtagttggcccatatgccccccagggacaatccctaaggaatccaaattataatcagaaagtcacttgctgaccagggattataggaataagggacctgggcagaactgcccactctctcctgttttagtattggtgaaactctagtactgtgcagggacttttggtactcacttgtaacacttgattgtctttttttttcttttctttttttttttaagacagggtctctctttgtctcccaggctggagtgcagtggcaccatctcagctcactgcaaccttcacctccagggatcaagcgattctcatgcctcagcctcccaagtagctgggactacaggtgtgcaccaccacgcccagctgatttttattttattttattttttagtagagatagggtttcaccatgttgtccaggctggtcttgaactccaggcctcaggtaatccacctgccttggcctctcaaggtgctgggattacagatgagagccaccatgcctggccggattgtactcttttgatcctacctgtttcccagtgctggattgtgagctctctgagagcagagcctgggtcttactcatctttatatcctggtgccaagtattctgtgttggtcacagaatcatctacttctatttggaatcatctactatttctagaagaccttagtagagataatggtattagtaagtgcttctgtgtttggggtgcctactctatgcctgcaggcacattagataaagatatctttagagctaatagatgccatgaggcgtatcctacagataggatcctgagcttcagagatgacagatctcatgtaatcaagccggctttatgaggtaggaggggatctgaacctggtctgcctcactccagagcacatgctcttcccactgggccgcattacctggagtcactaaggcctgtttcacaggccccttgactgggcagctcccggctctgctccgtggatgtgctgtgtgctaaaggggcggtgggggaggggggccctgagaaaggaatgttcaggcattggttaaaataggtgtcctagcctcttgtcatgccttcatattcacaaatgttcatttctttctttctcttttttaaaaaaattcttcctagggatgatgactgacagattaatatatgtctaactacatgtctcagaaatcaaaaggaaggtgctgtcagaatcacttgtcagaaaatgagattaggcgcacttgtcatttgctgaggattgcagtctttcagagataaggtttcatttaatgagggtaaaaagcctccttttaaaaaaagaagagggagcgagggagtgagggtggggtaggcgaggagtgatgattcttttttctggtgtcagccaagtgttttatcacctaacgcgatcccgcggcacctggtagccactgataatggcaacctggccttctccacctcctctgccgctgcaccacttcaaaagcagctgcttgttacctgcttttacctctccttgaagctgaagctccttctcctgtgggaagagggagctaagcatgtactctagatttaaaagcaggctcaagaaagcatgcagtagaaaggaaacgtacagtcacatttcccaacaaactggaaagaatccacaatggatttcagtgagatatggagcctgtctgagtagtgaagggtaactaatgaggaacagagctagatcccattgcaaccaattgtgttttgttatggaaaatatttatcaagttcttttgcatttgttgattctcttacaagtgacatagtaagagctcctggcatgtgacttgatgcacctcctgcaccctgcgattcaggctggcaatttctatccctttattaagcttctctctacctcaggtgtggcctgtgctccagaagtatttcaaattaatcctcccccccctcaactccctacctccaatcgtagaaaactgcctctgaaatgaacaactttattgtggagaatgccggtgataaagcagaaaatccgtatttcagaaatgtttggtgaccaggcgcagtggctcacgcctgtaatcccagcaccttgggaggccaaggtgggtggatggcttgagatcaggagtttgagaccagcctggccaacatggtgaaaccccgtttctgctaaaattataaaaattagccaggtgtggtggtgcatgcctgtaatcccagctactcaggaggctgaggcaggagaattgcttgatgagcccaggaggtggaggttgcagtgagccaagatcgtgccactgcactccagcctgggcgacagagcaagactctgtctaaaagaaagaaaaagaaacgtttgttccagttctctactccaaaacttactggtgtaaagcagtacccttttcttctgttcctggatttggtgggtcagaaattcagacagggccaagcagagaagcagtttgtctctgctccaccatgactggtggtgacatgaatggctggggactggaatcccctggaaaagtcttcactcatgcatgaggcacttggcagggacaaaagcacctctgcaagccttgtccatgtagcatgggcttctcacagaacggcgtctgggttgtgggaggagttgccggaggggttgctaccagaaagcaagtatcccaagagcttgaggcagaagcagcgagacttctgacctggccttggaaagtcacatggagccacttctgccattgagctgaagcactgacaagcccaccaggctgaaggaaagaagatggggaccgctccatggggcagtgtcaaaggatgtgcagctgtgctttaaaatgatcatcatgctgtaaaggtttctttctacctgtgtttcttcacatctcacgaacgaaatggcctaggaatgtaaagtaaatgacatttggatggttactgacttggtataaaaggttattcctcttcattaaaaagaagaagaagaagaataagatataggccagatgtggtggctcatgcctatgatcccaacactttgggaggccaagatgggaggatcacttgaggccaggagttcgagaccagcctgggcaacatggaaaaccccatgtctaccaaaaattagcctggtggggtggtgcgtacctgtagccccaactactgaggaggctgaggtgggaagatggcttgagcccttgaggtcgaggctgcagtgagtcatgatggcatcactgcactccagtctgggcgacagagccagaccctgtctcaaaaaataaagagagagagagagagagaaaagatgtagacagagagagtgagcccaaccacattaatggcccagggagtctgaggggtggagtgtcctgttcctgctctctgttgctaatggtttaaaacagactcagacttcacttaaatgggcacctttctggccgggtgcgctggcttatgcctgtaataccagcactttgggaagccaaggcaggtggatcacttgaggtcaggagtttgagaccagcctgggcaacatggtgaaaccccatctctactaaaaatacaaaaattagccaggcgtggtggcatgcacccataatcctagctactcaggaggctgaggcagaagaatcacttgaacccaggaggtggaggttgcagtgagctgagattatgccattgcactccagcctgggcgacaagagtgagattccatctcaaaaaaaaaagttcacctttctgtttctttccagtccttctctgttacactcttcaaaaatcgtctgtacatacttgcctctatgttcttacaactttgtttagaacttaacatttaatatgtaacctagcttcaaccccattttctaacaattctcctgctattcaccagagacctcctaaatcagcgatccacctgtcttttctcagtccttctcctccagcacctctaacacatctgccatttttgagttctcctcctcctggaaatcccttcttgtcattcaactctgtctgtgactccttccccagcgcagtaaacgtggacactgtccaggtgtagtccttggttgtgttttcttttcacgccacgacattccctcatctctttgcagaagacatttgcaacttatctgcaaatccgagctctctttctgatgttccactcccaaatttctgaccgtggctaggctttcctcacggtcttctaaattcatctcgtcccaagcaaagtctctatattcccctgaaagcctccacatgcttctgtgttcctgatgttaaccagttccccagcctttacatcttagcatcgccctttgtgttgcatcactgccacacactcgtgcgttccttgaggttctgcctcctaagtgtgttttctcaccttagctttgccccgtgtctcctgccattttcctcgagtcacttttccttttttctttttgtagaggcagggtcttgctttgtctcccaggctggtctcgaacttctggcttcaagtgatcctcctgcctcggcctcccaaggttctgggattataggcatgagccactgcagcccacctcgggtgacttttcttaatgcttccctggatacctatcaggttctaccttataaaatttttataattttagtaggttctggccaggcgcggtggctgacgcctataatcccagcactttgggaggccgaggcgggtggatcacaaggtcaggagatcgagaccgtcctggctaacaccatgaaaccccgtctctactaaaaatacaaaaaattagccaggcgtggtggcgggccctgtagtcccagctacttgggaggctgaggcaggagaatggcgtgaacccgggaggcggagcttgcagtgagccgagatggtgccactgcactccagcctgggcgacagagcgagattctgcctcaaaaaaaattaataaataataataataataattttagtaggttctaccttccccacgtgtagttgtcctctctccctcctaaattataagtttcctaagggcagataacatgttttgttcttcttttttttgtacatagttcatacttagtaaaagtatccatactgaatgaatggctcttacttatactgtaaagaaataaggcatacagcggaagtgtgtatgcttaatacacatacaatacacaaactgttggatttaaggaaagattttgatgacatgaagaggctaacactgccgaacgtacttccaaatattgccttgcccctcaactctccttggagtggtactggggggagcaagacacataagcaacaataataacaagaatcataatagatatatttattgagcacttactttgcagttgatgctcttctagctaaggtaatcttcacaaccctggtcttttcaagacacactttgagagacaggtacagtatgttttccattctagagataaagaaactgacagaaaaatcaaatactactttttttattagttgggtgaatgcttagtaccaccaaacaaacctctttttgcaatccgtgctaaagcaagtaagtgccttaggctcaccaccaaagcaggccttcctttttcccttagtctaaattttattgtgggttgaccacgaagctcagagcaacttccaaggggcccctagctgagcttagtcatcaccagtcctgaaggcaacagaaggcagaagagaggcccaagtgtgtgcaggactttttaaattcaaagctgtggtttttcgaagcacagggaccctgtccactggcaaacctggcccaatcagagtcttatatgctaatactcggattggcaaccatgaggaaagctgggagagtttcctttccctcacacaaaccctaaatgagtagatgaataaatagaccctgcatggtatatgtaatcatataccaagcataatgagagacaaaggaaatgtggcaaaatgttatcaatggaggaagtcaagcaaagagtttttgggtgttattctcaccatctatcattattttttcctgttagaaatttttcaaaatacacacttaggcaaaactttaaaagacatctaaaacaaacaaaaatgagtaactgtaaaggtaggagtcaacaataaatacacgggaaaggaatctgaagccaggaacgttgtggcccatccaagggggaagtgcccagagagaagggaagaggtagaactggagacagctggtgcttcttagggagatgctcagcctgcccaagaggctaatttaaaactaaatcttatccctggatcccacagcccttaatgtgacccaaactttccattaccaaattctggggttttaaatcctgatattgtgtgcttgaatctggaatctgtctcatccattaaagatctgacctattgaggccacatgtgtctatgcaataagttcttttcaagccaaactttcatgttaaaaaaaaaaaaaaatcctgagaggaaatacatgtggtccctgtccgcttctagcccacttcaggctatttattgttttatttgattgttgagaagtcagaaatgactaaattggttctcaatgtggcctgcacatttccttggctaggaatggtctgattaaggcaaagcccaacttagaatttagcagtgttctgatctgtgtgggtttgggggaaggcatgtgtattttgttctttcgttctgaagtccttcccttgtggatttcagactaaagtgggtgtgatgacacatttacccttttggttttgtttttaaaacacaaagctgacaaatgtgtttaatggccccgtagtaccaactgacagcggcacggagcccaggaggctcacttgtaccttgactgtctcagtgaggaagctgaattttactcaccacttagaaggattaaatgcagaccatagcatacttctgacatttcattggcttatcaggaaattccatgagagtggggaggagggtggaagcagaagaggtacatacattgaatggtatatcctacttagaaattataaactctaagaaaatattaatagaaggaggaaaatatttatttttcagcacagagactattctctgtttatacattaggtaccagatcataaagaatcacagagagagagagattattcatcccaactggtgtgcattttaatggtgaagaaatagttacctgacttacccaaagtcataactagttgggactggacctgttgtaaaatccagggcttctgacctttctaatccagtacagtattcattcagcacctcatcttccctgtcatggtctacaatagccctgcaaacagtcttctaaaactcatcagagttggctgctcatgtgatccggtccaggtcggttctctaatctgcctacaggtcagttctttgaaatcatttccatgcctcctcatgcacccccaaactcagctggtcattttgcaaatgcaggttgtcagctgtgagtgagcactggtaacagaaagaaaatccatcaccacgagtgctgatggaaaaacaactgggaacgtactgcctagtagaatgttgtttgtggcccgatctttgtataagaaggaaaacatcataaattaaaagaaaagctaccagccaacaactgtatttttaccagcctcctcttcttccagaaaactcattgcgaggaaaataaatagcattctttcccagcagcacaaccgaaagtcttgttagttataggcgagtggctatttgaaagcctggctacaattttcctgttttactaacacttgtaattaaatccatcaactccctctaagattctgtgtaaataccagatgctccctacatttttttctctcctggagaatatgaaaagttgtacattagcagtagaggaacttcaaaggaggcacagacctgagtgaaagtgaagttctgaagatccacactcgcttccctgtgaatttcttagagtgttccagggagggcagcccaccacacttggccagcacaggcccatcccatctctcacccgagtggcggatgttaagttgacatccgtgccccagttcaggagcagatggctctgcgtggggcatggtggtttgggagaatccacccgggcctggcgggaatcctgttgttgagggaggagtagggccctgcctcccgctccccgagggtttgcagcccgcttttcatgtgctattgatgctgcccccacccgctgtcacttggagtcattcagtcaatcacatggagaatcagaggagaggcttgggatggctctggataaatcctccctcgctactgggggtgagaaaatcctcttcagagcacatgcactcctcagagggcatcagtgtacatatatatatatatattttttttttcttctgtatgcaaagaagagtaacttgttcccccaaggtgaaggatttcagcggtaggcaaagcaacaccactaccaccccaacccgcccactttgcttttccagaattaaacgtagttgcctagagctgtcatgacctacagagaaagctgaggaagtgttaagtgaatcatgaaagcaaatcaacagacctgctggtatttaaattttagtgtattccagtgtggatttcttggtatttgtaatgcaaaaactgggaacgggggctccacctcctctcccagcagatccaaccctatgttccaacttagtcccagcatattcgaccccatgttttgtgtgaatttactttaaagtctttcacactcccgaggccgtcagcaaagcactcatatcttatgggcaacccccagccctcttcgcttataaactaactgtccgtggctttggggttgttccctaccagttttattgggcaggttgttagctaagggattcattctagaaccagaggtttgaggcagacctctaagatcctcttgactctgagtgtgtggaggagagtgagggaaaggacagaacccatggcccgcgccacctcagcttctttcagtttctatttgaaactgaaatcacagaagagctgtcagatggcagctgtgcatttggtggaaatgagaattccagattttatgctaattcagtttcaggttcctttgaacctgcagtttatggggccgtgctgaaaactgcaatctgttttggataaaagaagggattactaaagactttttagttgtacaaacattcccagcctccaaaaggaaaggggggagaccagatttattctttcattaaaattgtcatgttaagttttcttctgctttatcaaatagaaaacttttccttattttggcaatgatttttcttatttcaagtttttttgttgttgccgtgatttattttcatttcagtagcactctttctcgaacttcaaagtccttgtcacttcctcccagaggcaggaacacaaaggtggtgcccatggatgtatctcatcctggcatgtgctcaccttcttccattctcgcagtgttgattgaggctgacccagatggttgtttcacttacctattattgctttgtaacaaaccacgaatttggagcctggaaatacaatgctgccattagggcagggctctgcagagaagcttcctctctgttccacatggcatctgctaaggcaagttcagctggagctggcggagccacacccaagatggcttcttcacgtggctggcaagttgtcaggggctgttggctgggaactcagctagccctgtggtcccaaggcctcagcttacttccatgtggtactgcttgggcatccttactatatggtaactgtgttacaagcttaaataaccagaagctgctgggcccaaactctgaatctccagcatatcacttcctcctcattctattcatcaaaacagtcacacgtcagtcacaaggacataagtttcaccttctaatgggaggcatgacatgcacatacagaattatttgggagccatatttggagatgagcaaccacaatggttaatgatatattttttagaattttgattttcaggagaatgtacccacgctctgttgttagccatatgggtttctatattctgtgaaatcccaaactgttggcaattcgtggaaaggactttgcagtttagttttatgtttgagataatgtcttcattctcttctgttttagttggcagagatctggtcatttatttatttactcattgatctgaccactgcgtatcaacccatctcttacatgtgatgcatgagaatactgtactagatgttaagggcaatggtggtgtgtaagagtacatcacagtcctggtccttgagtgattgaatctacagactgctctccaaagcagtatcttgttcccagtgaggatacgtgtgcccctaaaggaatggcagtgtccagaggtgagccgagaaacaactacatgttatatattgtcttagatctatgtttccattaggaagcattcaagaaaagctgtagtttggagcagaagaagaaatttctggtgtaattcatttgcaatacagatctgtaaatggaaattacataggaccagagaggagctggcgggtctttgtaggcacacaggcttgccctgaccctatgtaacagcggcatatgatcataataactggcatttctgtaacagttaaccatctacaaactgtgctaatttgattgataaagccccagagatggaggctattggaatggccatagtagggtttcccattccattctgatagcatggaagagacagagagaaaaactaaggccagagcaagagggaaaatcagaaaccttgctcaataagaatgctttcaggaaatcgaaactaagggaattctacgacattctagctcctcagctactaccccagcaagtgtatgattccccaaaccagtagaagcaaatattttgtcctcagccaacaagaattcctgcaagtcaatatttggaccatcaggatgcttaataataaggctagggaaaaaaaaaaaaagctttgttagatcattgtatattagcatagatgcaggagtcaaattttcagtaccctaaagattattaatactttcaggtaacgtttccaggaggagatagcaaagcctttgagtagaaggatggactaacatgcggttggccaccattctcaggatgtcagtaatctttcaaaccacaaaacctgggaaggtaaactacttgtatatcccaggaatagtcacgtgacttatagacagccttaccatgacccttcagatcttaaaacctctctagagtttagacagcagaatgattttgtcttagacatctggccagtggagggagaaactgagatttacccagcagtggggataggatggtgtggtgtggtatggtgtggcgtgatgtggtgtggtgtggcgtggcgtggcgtgttgtggcgtggtatggtgtggcgtggcatgttgtggtatggtgtgtgtggtgtggtatggtgtggcgtggtatggtgtggggtggtgtggcgtggcgtgtggtgtggtatggtgtgttgtggtatggtggggatggacagtgggagcatggtattagggaaggaatgtgacatgcctgctggcaccatgctataatcctcattccttcactgcagaggacctccttacactcctgtatccatttccttatctaaaataaggaagaaactctccgttactctctttgcctcacaagattgatgtaagagcaaacgacattataattgtagcattctggaaaaatatgtgttactctagggcatttttggcagcgtcctttggagaggctgaatcttagaaccagtaaatggcaccgtcacatataatttatggctcatgctcttttttcagtctagggttcacttcttggttggttgatttctccctcccttccatttcaaggcactgaaatgaagactagaatcatattttgagcttgactcagtcctagaatagcagcagtctttccctgggactaaccaaagctagaaatgagggtcctcagatcagatacagaaaagtagttcttggctgggtacagtggctcacacctgtaaccccagcactttgggaggctgaggtaggtggatcacttgaggtcgggagttcgagaccagcctggccaacacggtgaaatcccgcctctactaaaaatacaaaaattagccaggcatggtgatgcacccctgtagacccagcttctcaggaggctgaggcaggagaatagcctgaaccagggaggcggaggttgcagtgagcagaaatcgcaccaccacaccccagcctgagtgacagagcaagactctgtctcaaaaaaaaaaaaaaaaaaaaagaagaagaaaaaagagaaatagttctccctcagtagtcctccctcaaactgagctgaaatgataataacatatgtggtatgacttgttgaatggtaaacatggtcggagaactcccaaaaaggtagtatttctttcaatattcatattagtcattccagcatccaactgaggaacatctaaggtggtttcagggccctcttttaccctgaattgttttttaaaaaaagaaaaaactgcggagagctcagcctaaaatggctaaaatgcctcttacctagagaactggaaaacgcgatcagttcaccagcagttccccgtttcccacagtggttgtttctaacattgccacttagtgcatctgctgaaacacagatggtcgcatccctaccagcaattgcagagactcccttcccaccctcccagaagctgcacccatgcccgggagcccatggctacagctcttaatttatacatgggtgcaatgacagccactgtttgctgagcaagcccccgccccagcaccatctcccccagctcagtccttcttctttcatagtaagctcctgtctgggatcctcacctgtcaacagaccttacagcaaggctgcctttgtcaggctaccatatgtcctgtccccttaggggactgggtgcttgacaaccttcatttataaaactaagaggggctgctagaagtcagctttcctgaaactataagaatgtctactcctaggtgacttgtcactaatgatgaaggtaagttgctgttccaagtgctttacatacatgaattcatttaaccctaacaacagttgcagcaaagtaggtgatgttatggccatactttctagatgtggaaactgaggtacagagatgcaaagtcctctctccaccatcacacagtaagtgggagtggaggataagctaggatttgaacccattggttctttcatgagtggctaagcttttaaccactagaccaactacctcttagttgtccccaaacatagaaatggctggcacctgtttaaaggccctttttgttttgtttttgtttttggagacagagtcttgctgtatccccctggctggagtgcagtggcgcaatctcagcttactgcaacctcccgggttcaagcgattctcctgcctcagcctcccccgagaagctgggattataggcacctgccactatgcccggttaatttttgtacttttagtagagatggggttttaccatgttggccaggctggtctcaaactcctgacctcaggtgatctgcccacctcggtctcccaaagtgctaggaccacgcacacgtgagccactgcgccagacccgaaagcatcttttcattcattcatttatttgtttttaaatccaatcgaatttagcagtggggagttgtcttaagtgtcttcttttccgctgaacacattattttcctcaatctgtcatctctgatgactgacttacacattgtgttctacgccgatccgtcctttcagctcatgcagacattttgtatacattttcattttaattaccaccccccaactctgccccatgttcatatggaaatagaggagccaggtgttggatacatgagccggtaactaaggcaggatgcgtacctggacttagtagggtcccccagggagcatggactcaatatgaaatgcaggtcgctagaccccaagtttcaaacacccatcaatatgacatgatgtgagaaagagcaaaccaagtccagacggaaacgagacagccatgaccaggggaggcagagaggcctcacagttctcatcacatgcactgctgtaaaaagtaagatgagatacctacagccaattgggtgacacgagcagggattggatttatttgtatttttcattgcctttctttgcagggttgtcagattctgaatattaataccttaatgtagatttggtggttaagtaagatatattttatggattttttaatactttttcccctttgtagtttatagtacattgtgaagtttgaaagtaaaattcctttccttgacttctacactcggaaaatatttattcccccctgtgtctcaatggtatgcatcataaactaatccagttcagtttatttacttccctcttgttgcagatccatgatcaattgtagcaacacgggcatataatggcagaggtttttactttacagcagtacgagcatgagctattgcactctcctttcagggtgataaggaaggaagcttccattttcagaatcacccattcagaaggggttggggggcactgagcagaggaactgggggccacctgacgttgattagccctgaatcgctaaggaagacatcccaatccatagtttcaaatgaatcagcctacacagaagaaatccctgggaaccagaaagagttttaatctcctgggctgaacagtgtggaaggcagaatattaggaattagcagaggtgacaagtaggacaacctcggcctgcctcccagtggcgggcaacctgttgactccagttctccatcctaggacccttgcttgactgccatgagtaagagcagtgggcaccgaagtcaaaatgcagatccctccaggcttctcagtagctgttgtctgccctgagcattctcccaaccttatcagttacccagacacttgttgggagccctcagactaactagcatgctgggacaatttccaccgtgtcttcattcctctcatcatgggtatgttgagcaaggcctcctaactctgtgctgggtacaaattccaagatgtggacaaattctaagatgtgaattctatccacaagaaaccaggtgagttcagaaggcatggctcggggcatacaggaggatttatcatcacaaacagataataaagtgttgtctccagacacacatctgttatttatactgctgctgtggcatggacaaagacaagcaagacacagtccttggatagtcacatttaaagccaaattgaggtggtgggtcctccatacagagaaaataaacaaaaaaaacaaatcatggccgggtgcagtgactcatgcctctaatcccagcactttggaaggccaaggtgggaggatcgcttgaggccaggagtcagagatcagcatgagcaagataaagagaccctgtctctacaaaattaaaaattagcccagcgtggtggcgcatgcccatagtcccagtactcaggaggctgctgcaagatgaccccgtgagcctagtagttggaggctgcagtgagctctgattgtgccactgcactctagcctgggcaacacagcaagacgccatctcaacaaaacaaaacatgcttctgcaccagtaagacatcatttttatagtcgtaggcaaaacggtagtcctcttaaaactggaaattacaatttaacatgtctaaatgacataattgggatgctgctattttatgttttaagaaattgaagccctcactattaagagtttcatcacatcttaaggctggcaggcttttataacattttgctggattcagggtcgactttataatctaccaagaatatccatgtggctgggtgcagtggctcatgcccataatcccagcactttgggaggcagaggcaggaggatcacttgaggccacgagttcaagaccagcctgggaaacatggcaaaacaccatctctagaaaaaaatttttaaaaaattagccagatgtgttggtgcacacctgtggtcccagctactcccagctactcccaactactcaagaggctgaggtaggaggatcacttgagcccagcaggtcgaggctgtagtgagctgtgatggcaccactgcactccagcctgggtgatagagcaagaccctatctcagaaaaaagaaaaagaaacacccttattaggagacccaagctatccactgtccaggttctgaccctgtctggagggattctttgcagtaggtcctctataaagatgtcgttcccagccaggcacggtggctcatgcctgtaatcccagcactttgggaggctgaggcgggcagatcacgaggtcaggagatcaagaccatcctggctaacacagtgaaaccccgtctctactaaaaatacaaaaaattagctgggcatggtggcgggtgcctgtagtcccagctactcgggaggctgaggcaggagaatggtgtgaacccgggaggcggggcttgcagtgagccaagatcacaccactgcactccagcctaggcgacagagcaagactccgtctcaaaaaaaaaaaaaaaaaaaaaaagatgtcgttccctagtagagatggtacaaaccactgtacccactttatgggactggtgtcattttgatgttcatgtggttattttcattattgtggtgatccccactgggagaacccagtagaaggcaaggctatggccattgtggccctaataaaatagacttttattttgttggtctccacggtaatcaaaagaagtgtgtcatctgtaatcataatagacaacaaatatatcctccttactaagtgccaggcactgttactgatgaaggccccaagaggtgtggctcctgttatctcactttctagataaggaaactgaggcagggagagtgaagagatttacccaagctgtcctggctcagaaatggcagagccacaattattaacctgatgctggctccagggcccagctccaaacctctaccctgaagaacaagtagaaacttggattttcagagcttgcagaacctttagaacttgaaaagaatggagacttccatagtttcagaaataaaccaggcatggtgacatccttgccgaggctagttggagttatcaccctccttcaatcacctagtgatcttttaaaactacatcatccataacgaaaggttcgaggaaattctggtgaagacttcctcttcctttaaaccacctcaagaagcacacagcacatgcgctgttagagtgcctgaacttcattatatttaggagggggagcacaatgaaattaatgaactttctctgtataaaacgcttaacagaagactataatttgtaagaaatattttgctaaaatatatttagcttaaatctggtaatttgtgatataaattgaatcccatctcagattataatttttaagaatttgcaagtataggccagacagagtggttcatgcctgtaatcccagtactttgggaggtcaaggtgggagaatcacttgaggccaggagtttaggaccagcctggtcagtataggaagaccttgtctgtacaaaaaataaaaattagttgggcgtggtggtacacacctgtagtcccaggtacttggaaggctgaggcgggaggattgctttagcccaggagttccaggttatagtgagctatgattgtgccactgcactccagcttgggtgacaaagtgagaccttgtctcttaaataagttaataaattcataagaatttgaaagtatagattgacttacaagaatttccctttgtttttaaacctagtttaaatctttagatgtatttttgagatttgaggaagaaggctccatattttaacgtagctttacattttttttaaactgattaatcataaacttggctaagatctttgggcatatattaaaaattatttctgaaatcattaatctaacaccagagtggaaattgagtccacattcttgctctctgctttctattagaaagggttgccgctttctaagacttgttctccttagattgggttcagaggctaaaggtgatgttaagaagccattagtgtttagtatgttaatccacctccatgtaacagaaaagatagcttccagcctttgacttggcatctttatattaaaactccaataaaaggaaattaaatttctcaaggaaaaaaaaaaaaaacaatcttcctgattattgaaagccctctgacctggattcagtccctaatatatggattatcaaatttagtcttctttcttccttcttcctacttctgatgctgttgtgtacctggtcccctccaattttgacattcattcccatccccgcttccagaaagcatagggaatagagcagtttggaaaccagtcagaaatgggctcatttgtgagtctggagagaggatgagaaatggagcaggtcacagtgggtggtgttctgcaaccgggccagccaggggaccctggggagcagcactggaggtggccacagtggtcagaggcttggcttttggcgttcccaggttcctcttgatgagagatcatcaaaagatctggacacatgcagatctggctgaggccgtcatctgaggcctaatccctggtaaccattgatgacaatttttttttttttttttttgagataaagtcttactctgttgtttaggctgtagtacagtggcatggcgtgatctcggctcactgcaacctccacctcccaggttcaagcgattctcctgcctcagcctcccaagtagctggggttacaggtgtgcacctctacacattttattagtagagacggggtttcgccatgttagccaggctggtctcaaactcctgacctcaagtgatccacctgcctcggcctcccaaagtgctgggattacagacgtgagcaactgcgcccagactgatgacaatctaatgcaaggcatgataaatgtcagaagtgccacctaatgaaagcaccctggagggccaagtggtttcagctggtcagctaagctgccatgccatcgtgctctcagtttaccctgtaggggatggtgcaggagctcaggcagtttcttccctgtaacaccgattttgctagaacaacaagataagaaaactgttccattttgattgttccaaaagaaacaaccttttaatgtcttctctagaacatttcatgtccacctttgagctatcctggtattgtctaaacagcttcagaatgaatgccgcctccctggaggaccacagctgggtattgtgacatcttgtaagcaactggaaaatccatctccaaacctataccttctgagatgccttttcttttgacttctcaggaggcagtggtagagaaaaatcactgttacctatatttttaaaaagacttgtataacaccacattgtgctaccagtttgggggagggggtgatgaagctagagagagaaggcttcttatttccaaacttagaggctagaggagggggaagtatgccatacagcaagcacccccaccttttttttttttttttaacttgagaggtttttcaagagtgccatgaaatcaaatagtgatagacatgcaacttcaaagaggcaaggagtggccatcattactttaaaccagtctgcatgtcattcatatgtggtgtgcatctctcccaacccctgttctcttcctctcttcctccagccacactccaggtaacggtggcactgggaggggacttagaactgaagttttcctctcaccccaccttggtgtgcccactgtactccacaaccctaccggttgcaacctagggcttgcttgctctttttcttgtactaggaaaattgcagcagcttttcctctgcaccaaggagggaccttgtcaagctgcaggtgtggaattaaaactccagatgttttcagagggtttcctcgcccggggtgcgttctggtgggagtgggttgctcaggggaatctgctgagtgcctcatttctggccattcagtcccccacaccctctgggggcactgcactgtgctctaggggatacagacacgatacatgttaggatgatagacgtaactgctgcccatgtagcgaggctttgccattgctttcattctttccctacattcggtgaatgccaggggaagcaacaggctccacttttgtggatgcagggtgtgcacgtgtcagagggtgtgaggagctgggaggagaggatttctaagtggccagttcatgctcttaagttattcatcaaaccgagcacactgcggtcagtcggctgtggtggggaaggaggttaggtgaagacctttgtgtctgagacccagaccgtgatccccgtctccattttccacaatgcaatgattattttgtattgagcgcctactatgtgccaggccttttacatacatgactttaccactgagccctcacaaccgcccagagagcctgctctttgcagatgtgactggcttggtggcaattcaaccccaggctgcgggcctagtggcctttccctgccatggcgcaatcttggaagcggcaactgcggggagggcgaggagcggtgcagtttccgccgcgcccgcccgcaaggaaggcagccggggggagccgagggctcgagccgcggggggagcaacagctgtcgatgtcgcgcctggggaccgcgcctccgctgggccgacccggcgccggggacgagaggaggggcggcgaggggcggggcgcgcggggcgggacggaggaggggcggtggcaccggcggctcgggctcggcgcgccgaggaagtcccgctccgagagctgcgagcgtctggaggaggcgcgctcggcgcagtcggggagcgaagtccggagcaaggggcccccgcgtagccgccgccccctcctgctaccgtccagccagggagcccgcggcggccgccgatggagttcacttgagctgtgaaccggcgggagaggcaggcgcccgcaagccgagcgcgggccggagcccagccagccccgggcgctcacccgccagcccgcaagctccggccagaggcgccgccgccccgcgccccgccgttgcagcgcctcctgggccgcgcgccggcgagatccgcacaaaatccagactcccggagcggctccctccagcaccgcggcgggcccaggaccaggcagcccgcggcgcggctggagaggcgggaccggctgtcggggagccccgggcggccgccggggagaagccgccgcgcgccctcctcctcctcctccctctccctcctccctccctccgcacatggtctcctttgtcctgtcgccgccgccgccgcctcgctcttagctccgcgcgccgcggcggcggctcaggccgctcttctccgcctcgccctcccgccggccggcccgggacgcgccttgttagcccccgccgcgccagcgcggccccgcgcgccgcaggagcggcggggagacagtggcgagcgcgggccgggcgatctcggcgggcgcgctcctcccgccgcccggggcctcggccgcgctggatgtgtgcgcgcggcgccggctctcggtcgccccgaagctgttgcccggttcggatctggttcggcgcctccgctctcggactttggcgaggaaggagcccagagactcttgtggacagagccgggtcgagagttgggcgttttctcttcgtgtgttttggtggtttcccccctggtctttgacgatcgcccttcgggagccctgctaaagaaccaaaccatgaacttggggctgaccggaccgtttaaccctttgcaaccaggtaatgaagcccccggggcgcggctcgcttgcctacctctcgcggtcggaagggaggcggccggatcgggggtcttttgttgcggcggccgggccggcgggcaggggtggcaggggcgggcttctcccgtctggcgcgcccaagcgccccttcgctacccctcctcccttctttcctcccccctctgcggccctgtcgcccgcctttgtactttcctccctcggccggccgggctcggccggagctgcgcggtcgtgcccgggagggcctggcgttcgccgccaagctccgatgtgaggagggggccggggcctgcgtccgcttgagctgggggccctagcgtggcgctgcccgctcctggggtcgcgcttccccagcgcggaggtcgggatcccggcccgcacccggtgccaagggaggcgaaaggagatctgggctcgggttcggcagcgggagaaagaactcgcgcttaagtttccaggaggtttctgttttgttgttcgaaagccccccttctcgcctgtgcgggtgcggagggcggcccccggggtctgcgtccgaagggagtgagggtgggcctgaagcaggaatcgctgggtcccaccccgtctgcacgcacggctttttataagttttccttattctccgcgttcccgcctccaatctgtttcacttacttaactttcctttaaacgccaactacggcttctagcaatattttttttacatccaaaaaaacaaaaaaacatattcccccttcccttaaataaaaagcagccaaaagagagctttggttttctgtcagttttagattcaaccacttcatgcccctaccctccaaaaccgagcgaggggatgaaaggaagtgagtaaaatcttcaagtctgtagcgggtagaggtgcccccgtgttcgagagaaggaagagctcaattcgtcggctcattctgggctcgccgcttttccatttgaataataattttttttaaaaagccaggaaaatggtccaggtaatagaaggaaatgcagactattttctgaaagcaacgaaaatgataaacatccccaagattcagacccaaggaacaaatcatttgtacaaatgccctaaaaccctaagtagaaggaaagttcgttgaggaaaagcaaagggtactcgtgtcgtttcccctgaagattttggcaaagaatctctcttctgacttgttaggacagtggccggccacagttgtaaccacctggataggagagagaagggatccagaatgttttcacggtcagccagagccccattgcagtcgtcatcttttgggtgtttttctggggaggcctttctgagacaccccctttcccagttgcaagaggcatggtgtccagccctgtgacttgtatcagccaagtaagggcttagaaagcttttagtcgaagatacactcctaagcctctctgaatatccggtcagacttacttccttaataacttactgatcggcatcataataatggcatcctcaagtttggttcagacatgaggatcacgtaagtgtctgtctgagaatcccatgtggagctgacaaaggtggcagaagcaaaaggcctgttcacccacagcttctgtccttttcactcgaacacacacacacacacacacactaagtgcaaataaaaacttggtcaggaaccatttactttccctgtttatgctttttgcattcagagacagtaatttgtttttacatttcttggggccaattagagtcactttaataggtaatcccagaattttcaaaggttatgtcagtttggtaaaacactttaataaacaggcttttttttccccttctatcagttcattaattttgtaagccatgaatttaacatgaatttacattcaaaaagaattccaacccgttctaagaaacactttttcatgaaaggatggtaaaatacacatatctcgagtttttagctgggaaactcacagtcctagaaatctcacttaatatttcagtgtagcatcatcatgcaatttttggctttataactcactattcttgatctaggtatgacttgtttctctcccattaacatttttttttggcagtttgtttttatgtaaaggtactgttatatatagtttaagatgtcaggaaggccctctgtatttttcattattcctgcaaaataggaaaaaatctatctagggtttatgttaaactgcatgtataaatgtatgcacttcaatgttcgttttgcacatacattcattgtttctggattggttaatcatatggacacccccataaaagtaatgttagaattaaaataaagcaaaaaacagtcttaatacaaatattttgtctttctatatcacttgcattgagaactagaacatgtcccccagatgtacacaggaatatttcatctttgtcagtattacatggaaagactaaattgaatatcctctttgtccctaaaagctagccccagagtcaaaatatgctgcacttcagaattccccccccccatttcctatatttcctttttccatatttattcaacattctaggcttttgctttctcagaatatgcatctctgtgtatcaagtgtgaaagatgagtgatttctcatgagggttatgtagtgaaaacagcacaaatatagcttggccattataactttaaatgcagatatatcctcacgttatgtagtggagatgcttaatttttattttttcaagttctagaaatattcagtgctgaaacattacagcattttccttcaaaccgacttccatgtttattttccagaacattagtgtataatttaaattggctttagttttactgtttaaacaggcttatttcaccttcctcaagccactgtaataattagcagacatgttctctagaaaatggaaaggaaataatgctggtggcatgcatagtggtcggattttggggcaggccggcttgcatctttttgaacaccaaggtcgtttggttactgcaagggacagggatcttggagtcatcagatgaatcttaaaaaaaaattaatttctggcagtgttggcttacactttttagtgaggaaaagcttagcattaaataataggcatttctgatttgtgaaagaaaattgaaaaattggcatgtctgcaaataccacgaaaaacataacatttccaaaataatgatctgtcaacgaaattgcaaaatcattatgtgaatgagctgaattgctttgtgtatcatctcatagaaatatgttttgcacagataatgtgtctaataaggacacatttttaaaatcagatttttttccccccagcaaatagctgcactgcaggtctctctcaagcagtcaactagcaccaccttatggatgatttggggacattgctgcttccctgctaggctttcgtaaaatgtagtcaactgatttaaaataatgggaatgttgatggtgatgacaatattaatgacaataataatgcttttttcccccttcttgtttttcaggcatcagatgccagctctgaaaaactcttcaacactgttattgtaaacaaaggtaagacccattcattctcctgagtaatggcttatttttatgttagtttcattgtcattgcctaggaagaaagaagagctagagtgatctttctcttataattctgaagctactgttgatgtttcatgtttttgcttgagatggaagtctgcatactttgtgatgcattaacattaacaaccagtttattttaaaagaatacattgagtccctatttaaactgatttgactaatcactactactatgtgactttaatatagaaagctgtactcgagaagaatagttctcaaaatgcctgaactttattgttacttatcaactacccagcaataggagaaatataaatagctgatgtgcattgcagactccagtaatcaatggatgtttagaattcacagtattatggtcataaaccaagccttactctgctgtgggctttctgtaaagttaataaacgagcgagagggcagaatttaaatatgcactatcccattaatttcttccaaaccacgatctagagtaagagaggctaatgatatagcagtacattaagggaaaactaaccttaaatcattgccagtaggtttctgcgcagctttcatttgttagcagtatcgttggaaataaggaaatttaggggagtctgtaatcactggctctgaaaggtgtgtaatttgaaagggacaaaccatataaactatttaatcttcccctttccactgtcgagcctgatttaggggctggcatgataattgctaagtaaagatgtgctttctgtgataatctctttctgggttacatgggcgacacttggtagcacttgaacagacttgggccttcacaaagtgaaatttgagaccatttcagccttctgtagttgccttggctagcatttttgctagctggttagtaagacatttccaagtgcagttattttgagctcccagattattttagaatttgaaccaattgcaattttaaatagtacattatgtttagagttcccttgaggtgtatgtgattgccgttactcccagaattactgtcatattgaattttatctttttttattgcataatggagtattccagttttatatttcatcatattttctgatggactgaaagtttgtataaatgtgttatccataatgctaaaagcccaataaaagaagatgtgtgccattcatagcatacagtactcgtgtgtaaaaatgcacaattgtctaccacttggcgtttccttgtgagaaaggagggtgatgggagagggagactggggtagagggcaggtcaccaaaggcagggcttcttcgtttctgcagccccccaggacctctgccacatgtgactgtgtctgtcttctgctgatttgctactgaaagctttggaatgtatttcccctttctgggatcaggccctagaataagagttggctccaagacctgcactctggccgccactgccctgaaagattgtcttcagggcggatgaacagctcgcctctgcctcttccctctggttctttccccccctttttttccttttccaatcaaacgtttcccacattcttatttttgtttacttacagagtgtgatttgtggcatctatttggttgtgaatagccctccccctgacagggtgcctttcttctgagctgcttttctaggggtgatttagttgccttgaaaggattaaggtttctttgtgtacactaaaatcaacataggctttttctaagctttgcttgggaaaccatacacaaataagcattttagttgatggcagattattcctttgccccttatttccatcaaaatggcctttcttttctcctccagagtttccccttaatgccttatgctaattcctgttggtaacatgaatgacaagagacggaatcagtgcgaatccaggtggtgcaaagtagactgactggtatcccgcaccccctttcctccctggggagaaagagattaaggggggtgtggagggggaaagcatcggggacagttttgttaaggggattagtattcaaactgctaaatatcaggaaaacaacttcaaaaagggattcattgtgtagcgataatgtcaataattgcttcaggacaggtgcagagtctccttataggcttgtggttttgggtctgtttttactccgggtagtggcagtgtttacaggatgaatggctgacaaggccttcaaggaactgtcagcttcatgcacatcaagttcaagttttcctgcaaggcggcctgcctgcctgaaagtcaggtctcctatctttgtccagtatctttagccaagagcaataaaaagcatcataagaaagggcaaatttacaccaggtaacaaacacaactggggaaatcttcaaagccccagcttatgggacaatctaaccagagtgcaggggagctgacacgtgtatccctccacctccagatgtttaagttacacatcacttctccctctcaagagactggtagtattctggccttagaggagtgtggctttaagctgctggtgagattatgctgctgagcctggtggcaggcagatttggtccataaaatttcaccgtgggagggcagtgctaatctcacaagctgattgtggtgggggttgggggggcgcagccctgatgttgggctgcacagtgcggagatgaagctcaggcagaggcagcaggggccgtggctcgaggcccatcagtcagcttgtgagcttgaataagtcatttaccctctttaggtcaagattttcaatcataacaaaacctattccagggccaacatctctggtggggataaaacaattaattgggaaggggcaggggttgaaacagagtggatacagtgagtatattttatatcacgtttgttcatcgattttattttgactttccctgtgttatagatgccatccagtttcatagagatttttgtgtttaggtgttccgaatggtcgttttcttctcctgccttttatttcctgctttaaaacaagttaatcaaacagcacatgcttgcatgtacacacaacatgcctaatgaggactgagcatttcgaaaggggtgtggcattgagcagggcttagcgttgtagacacaaaaaaacagtttaactttaatcaaggtcatagttgccatatttaatctttatgtgtttaaatgtttacaggatgttcatgtgaattttatgaatccttctgtctttgtgattcaaccatctgccaaagaaaaaattaattttcccactgagacagaggcacagagagagacttagtaaccctatttagttgattgaaatgctataggagcaacaggacctgtaccccaaattctggggtatttattctataaaggaactttcagtctattcaacatggctagtatttattatcctctcttgcctactgtagatccttgctggtgtcaccagtttggtctgtagacaaaagtgcagaaaatgagttctttgctgcacacaattatcctgccaagataatgaatctttcctaaaactcttggattgctccagagcagagctgcttgaggaggaaagaaaagaagggaagcctgtctgggaggaaggacaacactagtcaggcgtcaggagttctgtggagccctctgtttataggatgccagtcctggcatgtggctgtggtctaggttaggggaagagaaaaatccctgaattgctctcccttcttggttcagagccctccttcccaggatttagcccgtaaccaagacaagtcacagatagacgatgacaagtcaagacaactcatagatagacggtgagaggggcacagtggtgtattttaccccgtgactttctcaccccttctctttccttcaactttgtctcaaattgcagaactgggtactcctggggaaaagcctcctgagtgagccatcggggagctgtgcccagctaaatgggcatttctgaatggtttcctccagcagggaatgaggcccctcattctgcttctttctactgtgggcacccagtgtctcctgaaatgtgaacagcaacagagcagctgctcaccctcgtaggcaggaccccacctcacctccatcagcctgggaggttctagtggatagtcactcaccaagaagagcaccagacgcaacgctctggccacctggagccctctctgaccaggactgcttttcctctcccgggccctaccaggcctattagtggaacacacccggcctcttcttggggttggttttgcactgagaatttccggtggaacacagatgaggttggagcctttaggttagtgaagcctttggatatttttggcagtatggttctatcagcattgtagaaagaagacctagcttaaaaattgcctgaaatctgaggagatgaggtaagaaacaagttacccagcgatactgctggcttagtaaccaggtacctaataaattcttccatggcgaccatatgaccttattctttaggtttagacacaagggatttccttggtttggtgacagaaaggtaagagttatattaccatcaaggtcaccatttgacttttaagaaaaacccattcccgccgagcatggtcactcatgcctgtaatcccagaacttttgggaggctgaggcaggaggattgcttgagctcaggagctcaaaaccagcctgggcaatatagcaagacctcatctctactaaaattccaaaaacctagctggggttggtagcgtgtatttgtagtctcagctacttgggagggtgaggtgagaggatcacttgggcccacaaggtcgaggctgcagtgagccctgattgtgccactatagcctgggcgacagagtgagacaccatttcaaaaaaaaaaaaaaaaaaaaaaggcctttccataaaataattctatgcatgaaaataatgcagttgactgtggaatagctctcttaagaaaaaaatttggtttacagtttaaaatccctttataatgaacatatggagaccattttacaattcctcctagggtcttgggtttagtcgcagggaggacatgatgtaaagtgcatttccgatgtgcacaagagcaaactgcccgtttcagtctctgtaaattagtttggtttttgtcatgccttaaattccacataagggagagttagaacatcactcatttatttttctccctctggaccttctttgtactatttcagagcattttcttgagtttttaggagatagagatgtctggagagttaagtagtatttaagggtaattggtacttgatgcaagagacaaaggagttatgagtagttcagtccctcctcctactccatactgcaaatagcatgcaatcagctccttttgttatggaaattgaccttcctatagaagccgactcttggagaatttgttgtatagaatcatcctttgagcgttcttggaaacagatgccttgtactgttagtgtgaaaccaccagtaacagtcaaaaaatattccatgttgcatgaaagtgtctcccgaaaattttccaatagttgctttggccgaactgatcttttgccgaacttgtgaatgcgtgtggtggtgaatcctgggatactggatcccatcactggaattgtgaaccgggtggaagattccaggcattcgaagtgatcttgatgatgccttttgggtagaacttttgacagctgccacttttccatcctgagtgcccctgtgatggaggaggcgtagattacagtgtaacccattccattcttttagtcagatgttcaaacatcactctggttacttttgagctcagtggaaagcccttgacttatactgggcgattactgctgtcctttgaaagagttttctctatccttggcaatattgaccaaaaagcttgaatgttcatcagcctctcttcaatccattcatatttagcgttttgtgtagttaatgatgtagttagtatttggttgtctcagaaagtaatatgcattcatgatagacaattggaattgaaaaatatcagatcagttctctagagtctaatgagaacagttgagtgacaaagggctcaatcacgcgggccaaccccagacaggagggttcctaaatggaggaagcccgtggctagcccgtggcctctggattatttctagtttctgacaactgcagaaaaatgttgttttctctgaatatgtatgtttatttaactaggtttctttttgcttcacaatctggattccattcagtcagttaccactccaattaactaacaattatttaacattaacagtaattacagacgccagttaagcgcctacagatgtcaactgttagctttgtacctaatcactcaatgaaatggagaaagttcaacaaacatcaattagctaagcaattagtatgagttaggaaagagcatgttatcatgtgtgagctgattcaatttattttattttggcagtaaaatacacacaggcaagcagcaataagttcctcagataagataaaactctattgttttgcggcttatataagaattccttcctttcctgtgcataagtcaaatacactctcgtctggaatttatttaacagaatttgtctcaattactcagaaagcgcagtctcaggaagcacctttggtgaattatgaatccagtgactgtactgtataaggaaatgccagaaaacttcagtggagaaaatgattgattcccactcgagtaatccgctccgtgcatttcggatttttaccagtttattcctgaacctctggtggaacgagtgcaacagtgattttattaatttcatagtgcctgaacttttactcagctgtcttttatttagcccggagctaacatcaaagtattttacctacttgcccagtctgtgcttttaaaaagtagaaacagctgtctattgaagagccatttcatgaattcaccaaggagattccagactctcctgaactcagaggtgctgttccactctcttttttcccccttcgcctcctccaccccacagacttgactcttgtcattagctgagcttgcctggacttactgggagagtgcactctgaggcctgattgtatgaagtggcccagaaagtggagattcattttacctccaagaggaaagctgggcataggagctgggcctctgggtctcctcctacaaatgacttctcatcaacccttaaagcccttggataggagtggaagaagtcaatccctcgtggggtgctctgataggtctgtgtgcatcctatgtgcagaattttccatccgaacaagcctctcagcatgaactgaatgtgggagtagggaaaaagtattctgccactggtatggcttggggtgaagggccaccttgtcccatgtgcagtttctattataaagcatttcctcgtatacaccacgaccccagtacatgctggatcttgacagatgtctgctcttctgcatcaagtcactgggtctctgtgagtctgctttgtcaaattttgctgcagtaacaaaatagctcagagtcctacaacaacaaaagtcttatgttaggtgtcatctgccaatcagccgcaggtttctttgtttttattctgggatccaggccaaaggaggagtccccatcgtggttattcggctggtaaaggggaaaagagcagagacagaaacagagaatgcctccacttggaggtgggtgtggcgtttccaaaaatctcattggccagacaaagtcacatgaccaagcctgccatcaatggagtaggaagtaaactcctacagggaggagcagaagagaagagggatccacagggatccacagggccttggaaggaagggaaagcaaaccctgcatgggtaatgctatctgccacaggcccatcccagaaacctaacaaatcaggagctgttgcctcttactgtgttaatgcaaatgggatggagggtggcttgcatagctttgatgatctccgtaggcttttctgttagagacctggttccctaatagccatttggttggagtttatattaagttagatctgataagttgtcaagaaattaaatgcttttttattgtttatctggattaacttattgctggcttggaaggacttatggaaaagttgccccagagtgcagaaatgacttcagtgatttgcaaagaataattgttggactggccagatgtttagactctgcataattaacctgaggaagcatgattgctgtaaaactttactgcaaagtagtatgcgttgtcatggttaccttgaacatgggctttggatttaagattctcacagacactgctttgaatctcagtgctttgaagacgcttactagctgtggaactttgggctagttaaaacaccttagaaccaatttttccttctgtaaaatgggaataaccaaacccatctcttacaggtgctgtgaggatgaaacgaggcaatggatagaaagtgcttagcctaccttgtaccatattttgatctaatgatacagtgggctaagtattttacatacattctatcccctaatcttcacagcagctcttaatttagaaaagaatttagaaatagcatctgcattttataggcagggaaactgaagttagatatgaatagctagcatttattgaggactttctttttgctaggtattgttcactttatatgtaattcactcattttttaagtgagtaaactgaggctcagaaatgaggcaacttgtccaaggtcgcgcacctagtaagtggtggagctcggtccagctgactcctagacatgctcatagcagtcatactgtgctaggctctggggatatggcagagaatagaaaggaggaggatctctgtccttcctgagggagacacaaagcgggatggtaaaaattcggattgggggaaactgggttctatgggaagacactggcaggaaccctcaacaagggcttccctagggcttttcctcccataccttcccaaagtatttaatcttctcataaaacataaggtcccggaggttctcatccaggacttctccaggatgtcaaccattatcccatcacctgtggccagagtcgccatagttactgcagcgcagtggggctcagcttaaggcacctccagtttcctcgctcttccatgcccattcttgtgcctttgcgtgaactgatctttacttttcagccagattttattagaaatgatttaggaatttcaagcaggggcatttccctagcaaccgatgacataagcacaaggcccaaatctgtgctgttaacagggaatggcgttctgtgggctccgatctgcgtctctgaccctcgtaaaccttgtcttctaaaggaggaggctgagagcacatcattgcttttctaagagtccttttgaagagggaaatgtctcaagtgtgcccgttaatagactgatgtgggaggcagttatatttggatgcctttaaaagccacttggaaaacattttccccctcttatctatcacctttcacatctctcagcagagtaacactaaaacctaattttagccaagattacatcattttctcattctctgttcatagctgggaaaggtttttccatagtaaagctcctctccccgaaaacccagctcctccgcaggacctcttgggcttctgtgaaggcttctttatccataaagtttagtttgacaaggggtcttctgaaagcagattggtcagctgttaaagaaatgacatcagtggtgattccattgattcgttcaattggcttaaggtggaaaccatattgaaatgaattcttttcattcacatattattgagccccaaccatggaacaggatctggaggtaacaacactgaataatagatgacacccacctgaccagaagagtaaaagagtttaaatgtattttgaaatgtttttcaagtggtataatagcaaactcactaattaaaaaaaaaaaaatagccttaagactttcttaggtggaaaagcttatctgaggtgagccccgaagggtcagcagaccaaaaattgaccagccctcaaactgcagaattatgtctcgcatttagagagccccagaatctgccagcttgtgctcatcgttagactaaaacctacccctttgagttttccattttaaaaattgatgctattgttatatgagttaattaagctattgcaaaggtttttggcagtgccataaagatctgtacatcacctatcaatacagtccacttttttcacgtttcttcagttagattttattgtttaaatacttttttttttttttttttgagaccaagtctcacctcattgcccaggctggagtgcagtggcaccatctcggctcactgcaacctctgcctcccaggttcaagcgattctcctgcctcagcctcccgagtagctgggattacaggtgcccgccaccacgcctcgctaattttttgtatttgtagtagaaatggggtttcaccatgttggccaggctggtcttgaactcctgacctcgtgatccgctcacctcggcctcccaaagcactgggattacaggcgtgagccaccgtacccggccttgttgtttaaattcttaccaggttggcccaccgcaaggaggtggcaggagggaagccccatgcccaagcctgagcaagactatttgtaaagttgagcagatcactccatttgacttgcttttctcatgggtatcatgagaaactggggggtggcctccaagactccttgtgaatctaaagaccaaagtttgtgttagaaatattctagggccagccagcacagtggctcacgcctataatcccagcactctgggaggccgaggcgggcggatcacttgaggtcaggagttggagaccagcctggccaacatggcgaaaccccatctctactaaaaatacaaaaatgaggtgggcatggtggcacacgcctgtaatcccaggtgctcgggagactgaggcacgagaatggcttgagcccaggaggtggaggttgcagtgagcggagataggcgctaccacactccagcctaggcaacagagcaagattctgtctggaaaaatatttacatatatcttttagggcctctcagaacctgacgcttctgctgagggcacacattttccctgctagctgtgaaagagattctgaacacttagcattcaaaagcagtagtgcctcgtagccgataccaggacttcagtcctgaacttgtgaacaggaataagcctctctcctcttcaggagattgcatctgtgtaagaaagatcttaaaggtaagaggggattgagccccggcacaagggaggagtggaaaagacagtggctacaatttgaataccagctgttaaggtattacggtattaacctccagaataagagtaacaatacagagtcctccttctctgcttgcctgcatcttgggtgctgttaaaagagatgatttatctgctcagtaaatgtttataaaaccccactgtatatataagtacttagggttcctttgtacttgacttctcaagtggaatgactgtcatttggaccacttcctaggcagggattgctgcaggttagatgagggtggggggcaggggcgagataccagagaaagtgcccaagagcaccccaggggcaactgccaggcagcttctttttctatgagatgactcattttaccaccacgaattgaaatgaggcttgcatgggccattgtagataatcgaaagaatgtcaccaccctcccatctgtcttcagctgtcacagactcacacaccaagcatttcatcagagttctagttcttcaagttcatctaggtctttttgactggagcaatctgacttcctacttttcttttgctagaaggtgataataattgcagcttcattcactcagtgctgcatttgctgtttgttggtttgtaattcgatgcgcagtcttcttgtgtctttgcgggagagttggttttagaggtggcacacaccaaaatcatgaatggatttaaggagggagaggctgaactaatttgattgttaccaagtccataatgtgttccttgggaaaattccacttgtctggactgtgctcctcactttctgagattgagaactggagaaaggaggaacgtcacagacaagacagcaagaagcttaaaaaacaaattcctggatttggagcagtgtgctctggtggaatattagatgataaactacactttgtggttttgttttgtgcagttggctgtagaggccacatggccctgtataatgacctcttcccaagatgttagacatcaaatcagtttgatttctacccccatgggaagaggaactccggttgtaaagaggcagcttgagaataactggtaaagggtgacttgccatttccccgctggtcttgcctcccaggagtaactgttatttgaccacatgacccagttacaacctgttacccctgtgtggccagggcctcacccccccagagcacaccttcgggtcaggctcatgcctgatttgtgccttctttccttctcagggccctccaggttgagggaagacagctttacacctccaccttctgtattagctccaggataaacttgaaaactgcctactctgagggtttttttggcattttaaaagttaagtctgactttccgagccctctcagcatcctgccaggtatcttatcttattcaaatatcctaattgcttctggggctgcacatcatcctagcacctaactgacaaaatagaccttcacctgagggcctcattatgctttctgcctgtgcatcaggccaaaaatacctccacaatacctgctcgacatcctgggcttccaagtgacaaacaaataattgggtgaaacaaaccctgggcgccgagcagctgccatcagtgtcggagcacagaagagtccacggcagtaacagtcacagcgctgcctggttcatgtcagagcaaatctttgaacagtgggttgtgctgacaccagagaatgacagctttggaaatggcatgctagttactgctgcaagtgaggcctctcatgtagaccatgacaagcggctgtcatttccatacaggtgaacaactgacatcctagaagggggagggcgggagccacgcaggaggctgtgtttggcagtaggtggggccagacttcggagaggggtcccaagtaccggtgaccctggcgaaaactagcctaaaaacacagtctctttccatgcccctttactcactccccacacatcttctctgttacctctttggagttcatctgagagagggctacagaaatacaacccaacatgcttaaaggatgtttgcattttcactctgttccctccacatcttttcttctttttctttccttttttttttgagacagggtctcactctgtcgcccaggctggagtgcagtggtgcaatctcggctcgctgcaacctccactttctggctcaagttatcctccagcctcagcctcccaagtaggctaggacttacaggcacaagccaccatgcctggctcacttttttttttttttttttttttttttttttttttgcagagacagggtttcaccacattgcccaggctgggctcgaactcctgagctcaaaatgaaccgcccacctcagcctcccaaagtgctaggattacaggcatgagccaccacgcccagtgtcctccacatcttgatatgtcagggattagctttccggtcgcaatgcttagttttatagaggatggaaaaggcaaggtttctgctgataaggaactcaccatgaaaaggaatgggttagatgaaattaagtgcagaattgggtctagaccggtggttctcaaagtctccatcagcaatatctgcatcctctgagtggttgttagccatgcagaatctctgccccaccccaaacctacagaattggaaactctggggtagagtcacaactctgttttcacaagccttccaggtagttctaatgcagacgactgtggtccagaaaaaacgaggaagaacattttggcagtgaggttttgtaaatgctcagacgatccacagagtcactgggtgaaatcatactctattgcacagggaataggtctaggttcgtagttgggcagccttttttttggaggggacagagtctcaatctgtcggccaggctggagtgcagtgtcacgatctcagctcactgcagcctccatatcctgggctcaggcagttctcctgcttcagcctcctgggttggtttgtttgtttgtaaatatcaacttcacctgatctgttcaaagtgcccctgcacctaccatttccaatccttccactctctatagccttgtgaacaggcctactcatgtttagcgtggttctgacagatgctaggcctgtacctagggctctgctcatctgaatagagtttgaaaccatgaccttgggccaatgttatgctgtaaccagctgagctaacttgctcaaccgcttctgaaagacaaactgttccatcgagttccttcttggcaggtgctgcatcaccaatgccggcctgccatctgtgtgaagggctatcacagcacacaacacacacacatactgggcaaatgtgccgtgattaccactaactattttgtaaacaaagtactgtgttaattctgttttaaactgctttatccaggattgtagaacaatgggcagaagtgttttgaaatctttttttcttctgtattgaatattagagttttaaggccataaaattaacatgtaaattgagttttcccaaaaaatgtaaaactcttaagaagtttaagtaagttacctaaatagtaaagctttttcagttgtccttcaagaataggcatcttccaaaactagttgtgttaaagtagtggttctcaaactttagcctgcatcaaaattagctagaggacttgttaagatacagcttgccggccgggcgtggtggctcacgcctgtaatcccagcactttgggaggccgaggcaggcggatcacgaggtcaggagattgagaccatcctggctaacatggtgaaaccccgtttctactaaaaatacaaagaaattagccgggcgtggtggcgggagccttgtagtcccagctactcaggaggctgaggcaggagaatggcatgaacccgggaggcagagcttgcagtgagcggagatcgcgccattgcactccagcctgggcgacagaacaagactccgtctcaaaaaaaaaaaaaagatacagcttgcggggccccacctccagtgatttctgattcagcgtgtctgggctagggctccagaacttgcatttcaagtaaccaggtgatactgatgtttccagtcccctaagagcactgtgtgatctacatgggttaaatttaaatgcctttttcaatagggaatattttcaacagggaatatcacaccactcaaaggtgtgaaatgtatctttacatgtaagatgaaattgacacatgaaagtgaattcaattttatcatgaatcgggagctttttacaaaatgaaaattttcaactctaattcaatatagaaaatgtagaaatgaacccccatatatacccattacctagattcatattaagacttttccacaattatttttaggtgataggctggatagggcgatgtccaccttttttttctttattgctgaaatattttaaagcatgtctcagacttcatatcattttacgactacatactttagtgcacatctataaaaaagaacatttcttacaaaatcacatgttgttatcacactaactaaatatgcagtaattcctcagtgtcatctgaggaatatacccatccatgatctcatctccatgattgtcccacaaggggtcattttacgtgatctgtgcacatcaggatacaaacagacacacatactgcatgtcttaaatctagagtgctccaccctccccagcttcccattctttcaagtcattgacttgttgcagaaaccaggtcagctgtcctgaagactgccccacattctggaagtccttgcggtgtcatttagcttgttcctctgtccctcgtatttcctgtaaatggaagttggccgtaaagctttgattagattcaggttagagttcctggcaagaaaacttcataggcattgcaacgaacctcatgttgcctcacatctgggaacacacagtgtctgggtgtcccagttttagtgatgtcaaaattattcagtaagtttaggttgtggcaacctgatacttgcattggcatgttccccgtcaagcttttatctcatggtctcatctattgatgatgcttgcctgatgcagtaattcattagagatggcagagggtgacttttctagcattattccacatttattggctgaaattcttcagtacaatggcactttccctcatcaactagagttctttggttacactcaaatataatacaaggaaaaaagtaaatgctcaattctctccttctaattgcatgttttcagagcaaaaagttggtgctctaccaggagtttattaataagtctgaacagttctctgcatttttcttacaataaatctaacctatgctttcagtgcattgagcttttcttacatggtttgtgtttatcaattggagggacaaaatatctaaaaattagaaaggtactgcaagaacaacatcgtcaaatgaggtcatacacacttaagtgtgtgtgaatttagtcatacctgcccttcatagctctgttcaaatgccacattctccaggaagccctcctaccttcccaaggtttgaacctttcctgtggcacttcctgcatcctgcctgtctttttttcttttcttttcttttcttttcttttcttttctttttttttaagatggtgtctcactctgtcacccagcctgtagcagtggcatgatctcagctcactgcaaccttcgcctcctggactctagtgattctcctgccttggcctcccaagtagctgggattacaggcgcatgccaccacacccagctaatttttgtatttttagtagagatgaggtttcaccatgttagccaggctggtctccaacccctgacctcaagccatccacctgccctgtcctcccaaagtgctgggatttacaggcatgagccaccatgcccactgcctgcctgtcttttattgaagttgtagatgtcctcttccccttttctctgaattctacccctatcctacccatggtgacccacagggtgctttgaattaaaatgaattaaaatataatatcctaaaagtgatttcaaactttggaatttaggttatatcctgagaatcttaagtgacttgattcaagaaagtaggcaaaaacctgaatcgtgtttggtctgatcaacccatttggaattaatcgaaaatctgatgatcccaactgggtacttttcaggaaaggagtgggaggctgcccacgtatattgagtgcctacagtgtgccagggcacctgctgatttatttgattcatacagtagcctagccaggtccgtctattacctgtgagaacactggtgactggtaagtgacagtgagttcttgccatctcctgttctttgccctttctcttataccagcccagcataaagaggatcgggggcttcagtttggtgaatttaaaaatgtctcttgttaaaggccgggcacagtggctcatgcctgtaatcccagcactttgggaggctgaggcgggtggatcacgaggtcaggagattgagaccatcctggctaacacagtgaaaccccatctctactaaatatacaaaaaattagccggatgtggtggcaggcgcctgtagtcccagctactcgggaagctgaggcaggagaatggcgtgaacccggccgggaggcagagcttgcagtgagcctagatggcgccactgcactccaacctgggtgacagagcgagactccgtctcaaaaaaaaaaaaaaaaaaaaaaaaaaaaagggaagtctcttgttcacaacacagcttctcatccagcctgacctgtttgaagtatgtctggggtggaagatcctggtgatgcaattccagcctgggaaaacttgaggagaggttcagtatagcaccatgggcggcaggctgtcagtgtgtgttagatgtattcggttacttcgttttatgggagatttcatgtgatactaagacgtaacctcccacaaaatgagatttatagaattgggtatatgtctaatcaataaacatcaaactggaaaaactgtaaaggcatttcaagtgatagtagttatggctggaaatctcagtggagttattttttttttttttttttttattactgtttaagccttgacacttttatttatttagacactgggtctcactctgtcacccagactgtggtgcagtggcacggtcatagcttactgcagccttgaactcctgggctcaagtgatcctcctgccccagccttgcgagtagctaagactatataggtgcatatatacgtgcgtgccaccacacctggctaattttttaattttctatggagacaccgtcttgctatgttgcccaggctagtctggaactcctggcctcaagtgatcctcctatcccagcctccgaagtagctggaactacaggcctgtaccaccatacccggctaactttttaaatatttttgtagagatggggtcttgctgtgttgcacaggctggtctggaactcctggcctcaggcgattaatcctctcacccctgcctcccaaagcatcgagctcctggtgcactttctaactcacccttcgaggatgtgtgtatttatatgtgtcagggagaggaaattgatctcctgaggggtgggtggaagagcacttgtccctagttaatccttttttgcctgttctttaaaaagcgtgatagataggccaacccactatgagttttctggtggcaaaagtacaagaaatccctgctatttatccactatctgtgtagcttcctctttgaagcacctcaagccctcgccagcctcttcttgtccgttgctgatctttggctctgggtgccagtcagcctcaggggcggtgctgccttttttggcagagtatcactgttaagccactttttctctttaaaaaatgctacacagaggtttttgaacctgaaatgcaattattttaaaggcatcctcaccactcacttcccgagtgctctgttacacccagcgccacctgccaaccacagtgaacatccagccatgtcatttcttccattcctgccctggagtaaagtagatttactgagctgatgacttgtgtgcatttgtacattgcaaccttagcttacctcttgaagcatgtagagcattcatcacccaccattcattcactgcctactcccaccacagctgtttcgtggtctgtctgctccctgtgccacccccaccccatcaggtgggccttttgcaagtgatgaagtcacctgtgggggaagagctttcctttcctctcctcaactcagaaggcctcttcctcttgctcaagagggtgctgctgctttctgcctccttccccggccggcctccatcccagttcaccttttcagacatggcccctcagtcaactcttcccttttctcctggctttttatttctcccagtctcttaagagtatccttagctttaaaaacaataacacagaggatgggtgcagtggctcatgcctgtaatcccagcactttggagcctggggcgggcggatcacttgaggtcaggagttggagactagcctggccaacatggcaaaacaccgtctctacaaaaatacaaaatattagccaggtgtggtggcgcacacctttgatcccagctacttaggtggctgaggcacaagaatcacttgaacctgggaagccgtggttgcagtcaactgagattgcaccactgcactccagcctgggcgacagggtaagactccgtctcaaaaacaaacaaacaaacaaacaaaaaaacccaataacacagaaatgcaaacaacagatctagccctgctgcttcttcatatacttcaaacaaagaaaccttttttgatatctttttttcattccccctttgtataaaataccttgcattggtatatctttttggtgataattaaggtgactatataacttactgtccaggcctggacacttttgagagtgaaatcgactgtttcttcatcattatcctgggacaacaggcctcaccctggactgtccatgtaaaccagggcatataatcacccaagtgatcatccaaggtttttcagtttgtcagagtggttcaatccactcgtgatgatactgccatttattgagtacttactatgagatgagctttgttctgatcacttcaattaacccatggaaccctcacagtgcccttttgaggtagatggtattaacactgttttgactgtgaggaaactaaggctgaacaagttgctcaaggttacacacctagttacgtcctccacactcaccccatgctacatcagcccccaaggtcaacatccatatctcccctgagctgttagcagagatttctaaatgtctgctcaattaaaaggagtgtacactgtaaacaagagtatcgccttccaaagtaagcgtttagggttgcctggttgtcaagggctcaataacaggagtgaagtacttaattcttctctcaaatagtatgtggagccggctcggaacaagcagggcttcccctatcactaatattctctaaaacacactccccaccccacccacccccgaaatggagtctcactctgtcgctcaggctggagtgcagtggctctgtctccactcactgcaacctctgctgccctgattcaaacgattctcctgcctcagcctcccgagtaggtgggattacaggctcctgccaccatgcccagctaatttatgtatttttagtagagaccgggtttcaccatattggccaagctggtcgtgaactcctgaccttgtgatccacccgcctcagcctcccaaagtgctgcgattacaggcgtgaaccaccgcacccggccaagacacacatttttaaaacaaagaaatggaaaagtctagactctaagctggttacaccccacacagtgaaattctggttatttgtttctgctgatttttctcatctcacaggtttctcattcccgaaggtaatttaggatgatgttacttaagaactggagttaacttagtgaccagatattaagccatgaatttcttggtcttcctaggaatgggaattttacacaagtacaagcatctcttttgagaacttaggcctctcacagatctctagcctgacgtctcattcgtatctcttttctttcccttgctgttgctgttcttcttcccctactttaaaaagcctttcctgccaaaatctgaatcgttactccacggagtttattatttaggcagatccgaagatcaacacgaagtctttttgttgttgttttcttgtatttttttttttaatgccaccagggtgacaggaagatttactgaaagctgaacttattttgtttgctctaatattcacaagcctcaagagtttaaggaagtggtaagtacacccgctgcctcggggaatactgttagggtatgagcataaagttatccacactcgtctccaaatcgcaggcgtcaatctgtagggattatgcagcgggggaagaaggtggctattacccagaagagagctgcttgagagcttttcagcattcttccccacgggcacagagcatcttctcttcatgttcctacaaagtgttatggagaggaaagtagttggtagggatctttttattgtacatatgttttaacacacacacacacccctttctttcagctctggttccctctaaaaaggtcctgttctcatcctggccaccagacttcttccaccaggggtcccttctctctttctttgtcaccaggccaagtttgttaaccatcttcagaattacaggactttagtagctgaggaattccttttaaagtggttccaaactcagcacctttaggcaacacagcacattgttctgctttgttaagagaagcttgttttgaagagctaggaaaatgagttcaagctcagatttctctgggtagaaagggtatcccatatcagatgatgatgtgaagaagcagattgtgaactgtaaagtgaaaaggtcttaaacacgagagataagcaaaggggtgtgtatttcaggtaacatacaaacacaagggaaacagacctctggcatctcatcgcatctataaatctggatgatttcaggcaaaaatgaaaacatttgcttttcttcaatcttgggaatttctaaaacattgagttttttaataataataataataatagcaccatttgctgagccccaaatatatgtcttctgctctactgggctcctgatatacgttctctctagtgggcccaggacctgcaaggctggtattgttactgctgtatagaggttcaaggagatgacatgccagaggccacacgactgacgtgtgtgacagccagaatttcattcgtgtgtgtgtgtgtgtgtgtgtgtgtgtgtgtgtttccgatggagtctcactcttgttgcccaggctggagtgcaatggcatgatctcagctcactgcaacctttgcctcctgggttcaagctgttctcctgcctcagcctcccgagtagctgggattacaggcacctgccacaatgcccggctgattttttgtacttttagtagagaccggttttcaccatgttggccaggctggtctcaaactcctgacctcaggtgatccacccaccttcttttgtcaatttatccagtgatcaggtatttgagtgcctacctgacattgtctgagagacagtggacactgagatgttgtacatagctttgcttgtagcagttcatgacctgctactgggctagtcagatattgaccctgagtctattggaccgtagctcactttctttttatgttgcaaaattgcaaacctgtagaaatgttgaaagaacagtatgacaaacacccatatacccttcacctagatccactgttcttaacatttttctacatttgctttagctctcttttttttagataagtcatttcaatgttaaaagtatcatgatgcttcagtattcatctgctgcactttctgcataatctcataccattatcatacctccgaaagttagctgtgattctgtaatgttatctaggatataattcatattgaactttccttgcttgtttccaaagtgtgcttttttacaaaatagtgagcttttttttttctttcatttttgaatccaggattcaatgaagaccacacctttttggttgatacgtctctttgacctcttgaaattaaatatagcccccagtcccggccccaaccccttttaaaatctttaaatgacatcagcagtttaaagagcccaggctggttgtcttttaggaagtcctactttgtgaatttcctcatggtggggtttgttacccaattattttttaattaaaaaaaaattccattttcagtctgtgttcacactgctttatgagtccagtttgcttagattttttgtgggggtacttagatgtagctgctttgggaagagggacacgtggaaaatatagagggagatggggaatatttagttcagcattttatatgctataaataattatagctgtatagccaaatgagcttttagagctctggattccattggaatttaaggatttttctcttcccctcttttcttgtagagattagtttgttgccaacaaccctggaactggcgaactgcttaaggcataatgttttcattaagaaaggatttaactaattagatttgactagcaagctgacaggttaatcaataagggaagtggggctcagcaccccttaagttgggagtctccattaagtcattatggtgtctgctaaaacattcttcttcacaatgattcttaagaatttttacgtgaatccctctaataaatgttagaaaatcctgtccctttcaaattccgtaaagatctgtattgtgttcatgtatttcagattcaaactgttgagtattttagggagcctcgcagtgtcagacaggcccttaaatattgtcttatttttacttttgaagacccagtgggcctgttcatcctttgtcatgttacttcagcttttacaaactaacttcactgcagtttattatttaaatttaatttgttcccagataaacctgaatgttgattaaaaccagtaatttggttaagtgtcagaattagaagaaggatgtggaaagtgacgagtcggggataggagtagagaacgtgagcttcttgagtcacctgcaatgggtggtgttttataatgctctcttccctaatcatgttaatcaggagattttccttttggaactcctgactgaaagcttcttagtttacacacatgttcctccaggatgaacgctgaaaataactttttcggttttgtttgtttgtttgttttcctctatacaaccccttgcaattgctttggtttagaacacctttggattctaagtttcatggttgttctgggagacaccacattcaccctctcaacccaagaccttgaagatgggaggtttttcggacctcatcatagacctccaagggcacttggaagctcagagaggccaaactgccccaggaccagtgggctggcaaatggcacacctggatttggcagaaagcccctagagcctgcactcttagccactctgttaaaggagctcttctttttgagtcagacagacagcaggaagcgcccgctgtacagattgtcaagtgcatagtgcttggaggcatttgaaggaagtaaaaggctctatttttttccccagagaaactgttttaatttacctttctgagttgtagagaaaaatactcgcgtagctctgctcttatttatgtattttcaataaaacaaacttgtgtatttgggttttagtttaacaggtcattggcccacatgtaaagctgatttgttaggagtcattacctagaaaataaaattctgaaataaagatcaagtattcctgaaactaacgttttgtttatagacctttgcaagtatacatgtagactttttgagaatttgagaagggtttttgagacagagtctgggtctgtcacccaggctggagtgcagtggtgcgatcaccactcactgcaagctccacctcccggttcaagcagttctcctgcctcagcctcccgagtagctgggattatgggcacctgccaccacacctggctaatttttgtgtttttagtagagatggggttttaccatgttggcaaggctggtctcaaactcctagcctcaggtgatccgcctgcctcggcctctcaaagtgttgggattacaggcgtgagccaccccatttggctgaggacttcttttataaatgaagatgtggctgtgattttgcaggcacatatatacctttaggtgttttcagttactttcatatgtgcttatcagcaatttgattccatatttgatttataaccctgcaggtgtacaaaactaatattataactagattctctgttttatagtaagcttatcaaaaatcaaggcatagtgagaattaaaacatcagtttatttttggaagaatgattttattttcatcctgacttttttttttttttttttttgagacagagtctcgctttgtcgcccaggctggagtgcattggcgtgatcttggctcactgcaagctccacctcctcggttcacaccattctcctgcctcagcctcccgagtagctgtgactacaggcgtctaccaccacgcccggctaatttttttattttttagtacagacagggttttaccgtgttagtcaggatggtctcgatctcctgacctcgtggtccgcttgcctcggcctcccaaagtgctgggattacaggcgtgagccaccgcgcccggcctcatcctgacattctttatgtgtaaggtgctaaggtggtagcatactgctaaaactagattagtagtacttaatctagagggatcttttcaataattccatacattaaacaatttactgtctccattacaaggtgtaccattgacttaatactggttttttggggagggagtgagtttgagaaacactaggacgttaaaaactgctatgttgattgtaggatatctggatttcagaaacgttagcacatgcttgtgcaggggtgggagagggagaacctgtgtcttagaaatgaagaactatggtacatttatgtaggatatgatatcacattttataatttgtctgcttaaacaatgatttacagatcttttgagaaagagagcaaggaggttgggccttttagtaagacagaaaaatgaccttccgtttaagacttagacaaattaaattggactttgaaagtggtttacccttttcctctcgggtaaatgtcggaagtgagtgccctggctgaacataagggaaggtccattgtcagcaccctgaaagcctgtttgaaatgtcatcaacttggagcattcattggcagcgactatcaacagcccattttaaaaggatgccttgggtagaatggaaattacagtggccagccgttaatcctttttaataagggcaactgttgaggagaattatgttgtaagaatgaatgaaatttgggagcaactctagtccccatgttctgtcgtgactgtcaacaccaaatgtactttcatttttgcaactgcctaaggattttccatttaacaaacttacatgacaaatgggaaagcagtggcattccctgagagtccaaaatctggtttggctctgccgttagcacatttgcctgcagggattgatgtatctgattgaagaatgttgagttcagccaagagttaaggttaaggtccttctatttgttttgggtcagttcctacaggtagagaatttgaaagccctgaagtggtttcattgcccctagtagagataaatggccaaatgtaataaaaatagacagtgctgtccttaattgtcctcccctttatataaaggacctgggaggtggatcacctgaggtcaggagtttgagaccagcgtgggtggtgggcgcctgtagtcccagctactcgggaggctgaggcaggggaattgcttgaacctgggacattgaggttgcagtgagcagagatcgtgccactgcactccagcctgggggacagagtgagactccatttcaaaaaaaaaaaaaaaggacctgggagaagggaaggctagagggctagagccagtttgtattttattaggggtcaggatttactatgttaagttttaggatgtgaatctggaattttcttttttttcatgttttaagaagagaatagaaagatgatagaagatatttgacacctgaaatgctacctctcaacacattagaagtttttatatagagacaatggatgtgtttattagaaatctttatttactcataaaggaaatctcccaaggaatattttgctgtcataccatacatatatttgaatgagaaatggcatttcttaaaaaaaaaaaattacctcattgactcatttccaccacatatttgaactaatgaattgctgtatggaaatatactaaacaacttacagacatcctattgtcgtatatgtgatataaatgtcaacatttcctatcaaaatggcatctgatgttggccctcttaaagttctgtggcttaaaatactaacagtaggaggaaaataaacagagaccaaaatgcaaactcaacaatgagtaaaaataccacagtacaagtggaaccttctataattctgtatcccagaatttttgagaagagaagataacatcttaagcattaagaaatcccaagaccctgtccagcttattgctgttggagagccccaagaccctttaatgctccagtttagaggatcatattgtcaagtcagagaggcttaaacacaatagcatcttctggaaccctagtgacctgtattgagagtggatctggcgcttttgttcttttgagaggcaggtgtaaaggataacacacgggattatcttattttaaagcatctaaaagccaatcccatcccccttcctcattctctttcctctcagcttttagagtctttgatcaggtaaattctaaaggcagacgctagtgaagagtaggtaggtaggcttgtgttttcacttctccgtgccagctttctgtcctcaccctcctcgtcagttagcactgatgaatgtgtagaattagtgaaggctgggtattaacatcggtaatgtaactttcagaacctctgcagtgtctaaggggaggaaggttatttccaccccacctcgtgggaattcaaaggtagctttccgattgtgatcaggttaaacaattccctccaggccagcgtgtgggaacctgcacattcctaccaaagcaacggtaattgtacacaagtgtgttttcagatttctgtcatagcaagcaaaagggaccacagccgtgtttgttagagccccaaatgcctgtttgccacagggctgggttttttttgtttgttttgagatggagtttcgctcttgttgcccaggctggagtgcaatggtgcagtcttggttcactgcaacctctacctcctgggttcaagtgattctcctgccacagcctctcaagtagctgggattacaggcatgcatcaccacacccggctaatttttgtacttagtagagatggggtttcaacatgttggccaggctggtctcgaactcctgatctcaggcgatctgcctgcctcagcctcccaaagtgctgggattacaggcatgaaccactgtgccaggccaggctgtttttaaaacttacgtttcagaggttaaaaatttgtcttaagataaaaagactttcttaatcatctaatgtatcccaggatctatgtcttggttttataagacaggctggcagtaaatttcagacctgacctaacaagttaaaatcctactcctgggcagaagtcttctgtgttagtgacaatgtggaaatgaaggaaggcttccatttgtggataagtgtgattggacaaaggccaggatctgcaggtaatacagtggaggaaacttagcaggacctgattgttcagattcttctatgttcccctcctctgggaatagggagggcacctctcaaatgatggttttatggtgtatttcaggggaaggttagaaaatcctttctaaattttatgacctgctttggggaaagaagggtgggaaggtgagagtgacctgctgctactgctgttttctcagatcccaacaggccgtgttttagggtagtatgtcctgaagcacatcgcttatagaaacaaataaaaaaattgtttgctttgtgatgctgtcctgatctgtggatcttaattgctattactctgagattttcttaaagcatataattctttttaaatgctttatgccagccaaagttagaagagaatcctaaacttatccttaaagtgcaggattatcatggtttttgtagtgcagcattatctggttggaaaactaggtcagaaagacccttaccaggttgagttcctccaagcaatttcaaagtccatctggaggccgggcatggtggtggctcatgcctgtaatctcagcattttgggaggccgacacgggtgggtcacctgagatcaggagttcgagaccaacctggccaacatgacgaaaccctgtctctactaaaatataaaaatcagctgggcatggtggcgggcgcctgtagtcccagctacttgggaggctaaggcgggaaaatcacttgaacctgggaggcggaggttgcagtgagccatgattgtgccactgcactccagcctgggagacagagcgagactctgtctcaaaaaaaaaaaaaaaaaaaaaaagttcatctggaggcagcaccgtgcaagttgtgcctttgaccattttcccaattggtgattctaccagtgagagagaaattcacatcttgtatttttgtgtgtgtggcctgagtaagagtgccaaggcagcctgcattcttaactgatccattaactttcttcctccacagatcgtttccttaacaatgctccctgattagaagaaatgtctcctctcctcccagttactcagtgaacagcgctctctcccaaggggccacatgaaagggaaacccaggcaccacctccgggcaggattagcagcctgggaggagccactttctgttctttgtgaaagctagagctgctctgctcttgagaacagccatttacaaaatggggcgaaaacgacggccacaccctccatcactctttttctcctggtgctttccagagcctttggagacctgtgccgggggtggggcttggagctcccgtgccgatggttaaaggtaccatggctgggccagtgcggaccccagtgctgttccccactactcctctgcctctctccacttcccagttccttcctggtcaggagcccggcagccccaaagactggtaatagcctggcctgtaccagatgccctgttacttccccaggggtctcctccttcccacacttcatgatgcccagtttctgttctgttttctttccaggaacgtgtccctacctggaatccccaggggggcttccatgttccattagagaacttcacattcaaccctcgttttctgttttaaccaatcttgccagtaagtggtgagatccttcagggtaggacccaggtcttactcttcagtaaactcctagtttcaggtgttgaaatttggcagtcagtcaggcgttgttgaaatgaccagtaattgtttctgtactgtaggtaataaagctgcggaaattattctcttcctgaaacctgaagacttcagaaatgtgaggaagccaggcctcaagtgccctcctctttcagatgttaggataagaggttgagaagttgttgtaattgaatgaactgtataagcacaatgtcatgaacttctaatttcctcttgctgaagatcatgacactgtttgcccattgtatgtatgtatgtatgtatgtatgtatgtatgtatgtatgtatttagagacggactctggccccatcacccaggctggagtgcaatggcgcaatctcggctcactgcaacctccgcctcccgggttgaagtgattctcttgcctcagcctactgcgtagctgggattacaggcacacgccaccacgcccggctaattttttgtatatttagtagagatggagtttcactctgttggctaggctggtctcaaactcctgacctcatgatccgcctacctcggcctcccaaagtgctgggattacaggtgtgagccactgcacccagcctgtttgcccattattaagcagtaaaaggacaaccagtttttttttttgttttttgtttgtttgtttgttggttttttagttagacttcacagaccatgaaattcactcttttaaggggtacatttcattgacttttagtatgttccaagagttatgcagctatcactacaattaattttaggacattttcattcccccaaaggaaactctgtacccttagcttctgtacccctcatcctcccaatccctcagcccaggcagccactaatctgctttctgtctctggctttgcccgttcctgggcacttcatatacatggtgtcatacaacatgtgatctttcgtgtctggcttctttcacttagcataatgttttcaaagttcatgttgtggaatatatcagcatttcatttttaattgccaaataatattccattgtatggatatgccacgttttgtttattgattcatcagttgacggacattcaagttgcttctatttttttggctactttgaataatgctgccgtgaacattcatgcacaggtttttgtgtggatgtaagttttcatttcaggtatgtacctaagagtggaagtgctgggtcatgtattagctctatggttagccttttgaggaactgccagacggttctccaaagtgactgctcagtttttcattcccaccaacagtgtatgagggttccagtttctccatatacttgtcagcacttgctattgtctgtgtttctgtttatagtcggtgtgaagtaatatttgattgtgggttggatttgcaattccctgaatgactaatgatgttgagcatcttttcatgtgcttatggccatttgtatatcttctttggagaaatgtctaccccacccatttgcccactgttaagtgggctatttgtttttttattgttgagttgtaatagttctttatacattctggatcctcgacctttactcttaaaatgatgtgcaaatattttctcccattttgtgagttttcttttcactttcttgatagtgtcttttgaaggacttctttttaaaataaaactaaagactgatcactcattttatttcaccttttagtgagtattcattccaaatgacggtcaagaagatactatttttttttttttactttttatttgggaataattttaaacttataggaaggttgcaagaataagaatagcacaaagctcatatatcccctttacccagatctttttttttttttttttttttttttttgagacagagtctcgctctgttgcccaggctggagtgcagtggtgcaatctcggctcactgcaagctctgcctcccgggttcatgccattctcctgcctcagcctcctgagtagctggtactacaggtgcccgccaccatgcccggctaattttttatatttttagtagagacggggtttcaccatgttagccaggatggtctcgatctcctgaccttgtgatccacccacctcggcctcccagagtgctgggattacaggcatgagccaccgcgcccagtctcctttacccagatctaactcttaatttgttgctccatttggtttctatttccgtttcttcctccccttcccctccgccatcccccccgcacaaatagacaatttttttctgaaccacttgaaggtaagatatatatcataaccttttatgtctaagtaattcactgagtatttccgaggaataagggtaatgtctttcataaccacagtacagctaccaattgcaataaatttttcactgatgtgatgcctttatctaatcagctcttcagattccaggtgacaaaatgtcctttacggcattacttttcccctccagtataggatcttgtctagtgtcgggtgttgcatctgagtgaaaaaattaatgtctataagggtatttcctaaacatgtgattaataatcatactaaagtgtattatgcattacagctttcaaagtgttttcttgtttctttattattaaatatatttatttttcctcatagcaaatacttagaatagtgcttaggttagcatagtaactaatacttagattggttcgtgcatcagaatttctagcaggtctcatctgacccatctgccctttaggattcctcacatggagaagaggcttccatgtcctgagcacttccctagagaagagggggtgaaggagatagggatggaccagtctacctgttgagaaagagacagagaagtgggtctcagtatccgaggttcctgggttgacctgcagacatcacagggccaggtcctttccttcctagcagtgctatttgtcaagacccctgtctgtctcccctgacagaaacattgcggtggtgggggttgtgggggtgcatccagcatgaattctccttatcgttttgactcttcctgttcccgcctggctctcattgaacccacttaatcttcttcctgatgagttggcccaggcaggcccagctttccctttaacaatttgtcatcttatacatcaccagattccaaactctctcaattctagcaattctgctttaggataagaaaaaagcgtgtattacttttgcaaacaggtgcaaagtaaattggtaatcgtactgaagtacattatgcattgcagttttttaaagcattttcttgtttattgtagttatctggcctcataacacacacttgaggtagatgtggcacatgtgatctccattttgtccacagaggaactgtggtttaggaggtggcccctcaccaaagctcacacctgtcttctctgattttgcatcttatgctatttccacagggctgtgcttcctaatcagtttgttaataaaactcagtattgtgcatttggtaggaattggtttatacaccattcaagaatagtaaacatttacaccctagatttttaatgatctgagacagcaccgaagtatataaaaaagttaggctcctgagcacttaattcttcaaggaaggggatggaggaaaatctctatctgcagagataatagcagcttaagggtatcttaaatgggatgcttctcaggactcttggagacttagagctagtggtgtttaataaccacagtttacatcactcagagtcatggaatagttctattgcataaacagagcattttatggaaacttagaaaccctcactgctgcaggacaaatgctgtacaaaatcgaagatgccaattgtctagattattttcccctaacaattttgtatgaaaaatttcaaacatacagaaaagtgaagatcattgtacagtgaacagctttattcccacctcttccactcccacctgtactctcaccacccccctacccccacatctagattatgcagttgtaacatttttctacgttagttttttgggtttttttgagacggagtctcactctgtcacccaggctagagtacagtggggtggtctcggcacactgcaacctccgcctccagggttcaagtgattctcctgcttcagcctcccaagtagctggaactacaggcgcccgccaccacaccctgataatttttgcatttttagtagagacagggtttcaccatgttgaccaggctggtctcaaactcctgacctcaagtaatcctcctgcttcggcctccaaaagtgctgggattacaggcgtgagccaccacgcctggcctctacattagttttatcacataaatccaggctatttttgatatactttgttaataaaatcattaagcatctttgatgttttggatggaaggcaccctacagtctcttggtggctgagtttccttttatttttcagaatccctttgaaccccggcaacatgggacagagctgagagcaagggccttgattctcatactcaagcctcccgacagcccgctgcatgcgccaggcttcacgttgtactcgtttgtccagataccatgaaaaccctggtcgggtgtggtggctcacgcctgtaatcccagcactttgggaggccgaggcgggcggatcacgaggtcaggagatcaagaccatcctggctaacacagtgaaaccccgtctctagtaaaaatacaaaaaaattagctgggcatggtggccggtgcctgtagtcccagctactcggggggctgaggcaggagaatggcatgaacctgggaagtggagcttgcagtgagccaagatcgcgccactgcactccagcctgggagacagagtgagagtctatctcaaaaaaaaaagaaaaaagaagaaaaccttgataaatattagtatggggatacattgtcccctcccccctttttctctcagttaaaaatctgtcccagaatgaggtttggcgggacatatggtttggcgtgcttgtgggggctggcagggtgaggtatgtatggtagtgtagttatctggcatcttatctgctcactggaaatgttgggcactgaatagattagtcagagtttccagaaatagaaaataaagccatataataaatgcagaagtcccctagttaatgtcagctgttgtgtgatatctgccctaagtcattttattgcctttgtaagattcttaaactgtttatcattatccctgccttttttaaaaatggaagcaacatcttcctaaagaggttgttatgagacattagaaggcctgctttcatgcctaatagttatcaaaactgaaattcagtatagcagtgttgaaggtgaaagaaggtttgggtacttttaggtagcaagagagataattataagctttcaacccaaggtcaagataaatataaatctggaggaggaaaaaaaaaaaagaagtctagcttctcattagtaggacagcgttctcattttataagaccttaatacccaataggaaatggccgtcaattctgttcatttcatattctcacagcctgtctctcaggtgggagaacacagctaattcttagggtaagtgtcctcttttagaataaaaccttaccaaaggagagctgaaatgggttgtcccccaaggctgggagatgtgtttggttccctttgcctcacttcgacctttctgaaatcaagaaacaaacaaaatgaaatcgacttgtgaaaggatgtcaaaacgacatggcaaattcagttggtttgttcagaattttcttcctgtatttcctttttgaagttacaacagtcattcaggagcacgtccagaggagaagagctgggagggaggacgggtggcttctagagtcaaggctgggtttgcctaaccctgaccctcacgggggtgatgcggatgttccgaagaatgcattagcctttgactttaaggaccgcgaggagagttttcttccgaatcaagtgaatgcgggtgcatcaccctgtcttcctcattccctgtgtcagggaatgcatcggtagcctaaatgactttccctggaactgaagcatgtgttggctctactgtggtgctttaatgtttcctgaaatcctccatttggaggatagagtgcccaggagtgagagaatactgtgttattagaatgcttgttaagagggaaaaagaaaatagagcattaacagacaggcaatgttccattcccccgaggaagatttatgtgacctagatgaacggaactacaaatcttggagggacaagagacttcagaaatggcaagttcttagtttgggaggctaggtattgaagtttatccaaattaatttggaagtttagatcagttgcaatcaaaatccttatttgattgacagtggggatggataaaatggagtttggatttgaaaatctacataggaggaggaagtaatagtatatctattttattatacgtgtgtgtgtgtataactataacaattagaatatcataacactgttaatagaccataaagtgacaaactaccccaaaacaaatcccattttcacataaaaatttaatatatgataaaaaagccttcacaaatcaaaggggaatgaaaggcaagattattcatcagatagttaggtcttcatcttacaccggaataaattcaattgaactgaagagttaaatatgtattacaaaaaaaaaagccagcagaaaaatcaatagatcatatcaatcactcctctagaaatggacattatgaaaagtagatgtcagtatggaaaaatacttttactaccaagtgatataaaatgtggattgaagaaaaaaggtgaaatgactggcatgctttattgccagttggtttagggggtcaggtgtagatatttttgttacttgttttccaagatctgtgatgtggttggagtaattcaagagaaatgtatttataatatgcatgctttaaggtacgtctattcctacttttaaaagtggcagatttgtgttttttaatgcataaattagttgaatgttcatccatccaaagagggatttcttctgatagattggggtgattagctgaaagactcagttcctggagaagagaacactagtggaaaatgcccaactgttaggggaatgaggaacaacagtgctgttcactgcattcctaacgccggcttatcagagttttgttttctgtttcatacacttaggaaagtattgttgccacaaagtgcatctctgcctgttagaaggatccagacatagcgtagacggattgtgcaatggagtcagaaataggctgtcctgctcccagtgagtgacttccccaccccttcatcctccttgtaaatcaccggcattcctgatcactttccgtggttccagctaggttaacaacagaagggatcatttccctcataacagtctccccattagtcaaaagttttactctcaagtgactaaaacgttactcataactgcttacaaggagaaaagatttattttccttttacttctttaatgcacatctggtggagaccctgataagcagtaagaaatggaaaaagcagggacctagaaagtgaaagtagacagatttgggtagtgcatgcaggctaattaatgatcccaggtgggctggagtgttctggttacattttccatgggtccagccctagagcagagaccatgggcatcagcctgccccttcccattatgtggctcaagcaccaccgtgtgccaaagggcgggaacattagatttccccaccgctgtaacatctgtaaattccacagtccatagaatcaaaatggaagagaacctcacgtttctgattgccagtcagaaggaatttatttttgaaacccagtttgctctgttatttgtagtgcaagatagaaatatcttaaccgattttatccagttcttatttaatgtctgtgattttaggaggaagagactattgtgtcataggtatttgaaattcacaagcccctctccaacctaattttaccgaaatgtgttggtttcccctttccttaaactcacggaccacagttactaaatagtttccagagtggactgacatgcatttttctttacagctctgtcattactttctttattatcagagagtacacaggatattgaaataacctaaaatccagagaggaggaggagccaggggggtgaagagaagtcctgacctattttagagcccttgggcttcataggtaaccttgaaaatggaaacacatcattgcccattttattgaggttgtgattagcagtaaaatataatgcagactaattattatgttgcagccaattagcaataaagagaagcattttaatatacaaataattagattttaaaattttggctttgggaatttacaaagccctctatttgaaggcttgtacggaagacattctgaaaccaactttttgtcagataaagtccataaagctgaaaactgacatgaggaggtatggccgggttttcctgcgtctcacagtgcagttaggaggctttgatacttcatgggcccttctgcaaactttccttagtattaggaaatgaagtcttccaagtcagtcaagttgtaaacatgcaaaaatgctgggagtggcagtctctccaaacaaatgacccgttctcactgcggttttctcctggtgctagaacctgtaactcctgagttgattctctccaattggccagagaaatgggcgttgctgctggagcagatgaaaaggctattaaggcttcctgaagcacttagattaactagcttttttttttctcttggagcaaaaagttggaacaagttttttgttttttttttttttactttttggacatatgacaaatgtgtataaagttgtgtgttgtgcctgaggagctggtgaatggagttgctcttttgagagttgcttttatatcattgctagctgtgaggtacgtggtgggcatgaagagaaccagtgtcagtccctctgcagaagcagaggctgtgagctccactgtgagctgccaaggcccatactgctgggggatctttaatgcatggcgcaaggctcctgtgccccaatcccggaggagcggtgacagtccagggaagagaggggaccacgtgagtgttacatgttcttgatcacatttttctctattggaaaggaggatgttgaaagttaatcatgtggtttttctagtcacttaagtccttaacacactggatatacatagttcaaatacaaggaaattaacctggtttcaaatgtcttttcctcattttatggcacatggagtatagagcatattcaaaaccctcccatcccccactttgtagacaacacatctactcagaaggttttaacttaactttctgtattctggtgatgtccacgaggttttgaggccttttttttttttttttttttttttttttttttttgagagagagacagggtcttgctctgttgcccaggctggagcacggtgttgctgtcatagctcacttgcagcctctacctctagggttcaaacaatcctcctgcttcagcctcctggttaggtgggaccataggtgtgcaccactatgcctggctaatgttttttatgttttgaagagacagggtctcaccatgttgcccaggctggtcttgaactcctgggctcaagcaatcctcctgcctcggtctcccgagtagcttggactacagtgctcaataccacaccccactaatgttgcctttttttccttttttttttttttttgtagagatgagatcatattatgttgcccaggcccctctcaaactcctggcctcaagcgatcttcccaccttggcctcccaaaatgctgatattacaggcatgagccactgtgcccagtcacattttttatctgttaaaaaaaaacaaaaaccaagtttggatgttatgatgttagtagtgtgtctggttctgaagttacaggataggagatagagaaaaattgtgacctgcccaaagtctcaaagctaattctaaataactaaagttgtagaatcttttgtttggaggaccatcttaaaggtgtgatctgtactcagccatttgtctgatgtgtaaatcctcagtctgtagcttcccggccacgtggtcaccaaggctgtgcttgaacatccctgagacgcctttcaaggagcaccgttctgtctttgggcagctctaattgttaaaaaaaaaaaaaaaaaaaaaagtcttccttacgttaggctgaagtctgttccccatgtagttgttccccttggggccatgtaatacaagtctacttcctcttacaaaagacagcccttcaaatgttggacaacagcagtattcccggccctcctggctcccctcccctcatccactaccaaggaagcatggctgtgagtttgttcatcatcctttgaatgtgctccaactcatgcacagcccctttaaaaggaggtgtgcagaacctgattctcccagtggagcttaatcagtacctgtcatccccattttcccagtgacagatttttattgagacagccaacacttggattggtgttgcctttgacgaatttcaggttactgcaaagtgaatccaaataccaactattttcaaataaaagaaaggagaggcaagacttagcagcagcaggctttttacagtccttcaggtttcaattgtgggaccttacacgtggtgctattgcagctccaattttgtttttttcttttaacccatcatttcagcttgttaaactttggagattcatattctgtcattgagagttgtccttccttcctttgctgcttcagaggacttagtgatgcctttattagagcttttactacattgcattatggctctttatgtctttcctcctgagttctgctaggatcataatcatgtctcatcatattcctcttctctcttcaacactgacagctcatagtaagtgcttaatacattttcattgaatgaatgagtcaaaagtatttgctcttccaaattctgcttattgatagtttattaataattatatattattcatgctgtttcaatatttatcgtacttatttgaatatatacatttatatttatataaagtaataaatgtgggtattttattaataaataagttacttattaagtacattgaagaggacaatggctagatgctgttttgcagcccactagaaactttcccctgggccaggcgcagtggctcatgcctataatcccagcacttagggaggccaaggcagacggatcacttgcggtcaggagtttgagacccgcctgggcaacatggtaaaaccccatctctactaaaaatacaaaaattagccgggcatggtggcatgtaccagtaattccagctacttgggagggtgaggcaagagaattgcttgaacctaggaggtggaagttgcagtgagctgagatcgcaccaccacactccagcctgggtgacagagcgagaccctgtctcaaaaattaaaaaaaataaaaaaaaaaaagaaacttttccctgggatgactgttgatctgttctttgacattctttttaagataaggtttattttatcaggaatttccctaattttatagtcagttctgttacaacgctacatacagtttccttaaaatcaccatgctgttcacagtggtacaaatgaagccataagacttatgggagaaatgggattagggaccaaaaatttatcactgacagaaaaaaaaaaaacaggaacccagtaaaaacagtaacttagttttacacatgctaaatggttaagaaataaataggccgggcgcggtggcttacgcctgtaattccagcactttgggaggctgaggcaggcggatcatctgaggtcaggagtttgagaccagcttgaccaacatggagaaaccccatctctactaaaaatacaaaattatccgggcgtggtggcacatgcctgtaatcccagctacttaggagactgaggcaggagaattgcttgaacccgggaggcggaggttgaggtgagccaagatcgtgtcattgcactccagcctgagcaacaagagtgaaactctatctcaaaaaaaaaaaagaaagaaaaaaaaaagaaatgctacaataaatatggcatctaccttgtaaaaagcctgaagtttgctcatgggagctgacatgaggagggttggagccggtggttatagtggcgtggtggaaggaggattatctgaacttggaaagaaggttgtaacagcagatctgaatgtgctacactcgtagcacacacagtcagctgaggaaggcaagggatgcttgaggctgtatggttaatgtattcctgtgggctccagaatgcggctcagttttctccattcaccttgtactttttgcagacaaaattgcacctaagcaaacgttacattcacattagaataaactcacatttcaaagcaagtgtcgcagcagctcctgtttctttgttgtgttatttgcttgatcagtaaagcatcttttttgttcttatagtaattccaggcactggtatataaggatacataaattatactacccactcactctctaaaactcttgttcttaaagattggcttatttttgctaggaggaatgaaagtacatgttaaagagacatacttggctgatctagccattttccaaagtctccccccgccagaggaatatctcataagtctggttcctaattacatttagcagatttctctaaaatctaaaagctggagtttgaatggttcttacttttcagctagtatctaaaaggtgattcacttaggagcagcatagaggagaaacttgtatttcacctatcaagtttctgatttaaaagtgaaatttcagccaggcacggtggcacacacctgtaatctcagcactttgggaggcgaaggtgagtggatcacctgaggtcaggagttcaagaccagcctgaccaacatggagaaaccccatctctactaaaaatacaaaattagcctggcgtggtggcgcgtgcctgtaatcccagctactcaggagggtgaggcaggagaatagcttgaacccgggaggcagaggttgcagtgagccgagatcgcgcccttgcactccagcctgggcaacaggagcgaaactccatctcaaaaagtggaatttcacctcatatcatttacatgtgtgtgatttgatgatggctttaactgaaaatagactaatgccaatagaatcggagactcttagaactggaaaggaccacagatatcaggaagcccaaacttctctctttttcagatgaagaaaccaaggctctgcgaagtggagtgttacatgcacagtcacttagctagtggtaaagccagaacttgaatccagttaattttgaaactataatatgttgccttgcaaaattgtatcatagaaggacataaaatctgtgcatttaggaggaaatctaaactcatattatttcagctttttagtctgtttagtaagggagtttcaccaattcagttactactgataataagcttccccttgttttatttttgtttctttaagaaatctgggccggacactgtggcacacacctgtaatcccagcactttgggaggctgaggtgggcggatcacatgaggccaggagttcaagaccaacatggccaacacgatgaaaccccatctctaccaagaaatacaaaaattagccgggcgtggtgacacgcacctgtagtccaaactacttgggaggctgaggcaggagaaccacttgaacttgggaggcagaggttgcagtgagccgagattgcgccactgtactccagcctggctgacagagggagactctgtctcaaaaaaaaaaaaaaaaaaaaaaaaactagtatgacacaaactcaccaaagtggctattcctcagactctgtgctttataaattcacgtttgttagggcagacagaaaattctgtttctttgtacccaaaaagatttaagcatttgtcgtgcattgatctggggttttgagggggaaacatccttggttatgtctgtgggatttgtggtgccttctggaggattaagatgtcattgcctctagtcagggcatgctctcttttccagttggtgggtcttattttgtttacatctgcttcctcccagcactgacagatttgaaatgtgtgcctgaagtgcacctttgtgccaggcccatagttttgactggggccctcatgacccattggccatggtcactttgcctgggagcaatcatcatttctagggtataggaacttgaagcaaagaatttgctgcattttcaaaaagcaggaaggggtggttaaagtgtggatggaggggtaatctccccccacccccgccccagcccctgttttgtaagagaggctatccaactcatgtatttccagccccgagtgttggcaaaaacattttcatattgttctcacttttctgactgagtccaaaaagttcctgggaaacaggttttgtttttcctcgggggatgtttggatttgaaaacaccaaatttcaactgcaatcgtttgtccaagtgtggtgttgaaagtactgtctagatctgagtaaatcagaatctgaagaaatatagccaacgtcactcattaacaatgggttttccaagggtgagtgacatgaggccatttgtctgcggtgaggtagatgcgctcctcttttcagtggccccctgaggccaccaatgtcacgggcaagcacatcctcggtttggggccattagctgaatgccctctgtttcatcttgccttttctaggccgccctctcctgtctttaaggtcagggtttcagaatgtccttcagttctgctttagtcaggactaaaagccttccacagtgccttgacgaggaggacatataaggaagaggcacaattcaagtaaagtcagtctgtattgattttgtgaacccggggaacagtaagccagccttcagtgccgcctggctgccgggcgcatgccgttgtcagaccgatgagcgaggctccatgcagacaggtgacatattcgaggtggcaagagcagcaagagcttctagatcctgtcattttgcttctgacagtgtctttgtgtctttgtacagttggaggacctgactgacacgtgagccccccttggcagccatcatcttcagaatactgctttcctcccacgggaggagcttgtacctctctcatgtgtacagggtgcttatgtgctcatgagcaggcaaaggagcaggggacggtttcttccagatcacccttccaggtgctctggagttgatgtggcctggccaccttttcatcatcgcccctccagttccattgcagtgatgcattgcaggctctcctcaggaaaatggtgatttcagtattatattaataattagcaatttttttttttgcagttttaaaaaattgactcttaccctctgcatttgagaaaagtccttattatacgtttctgtattgtatcatctcccagtttgatgtgtatgtatcccgattgtatttcactatcattacggagatttttattgtgtcaagacaaaaccctgtttctgtctccccagccccatgtactttgagcttagtcattcgggcatcatttcttccagcattcactgctcctcagtgtttcatttccatttaatttttctatttagtttttagcagttctcgttggctaattttaaaaagatttgtactttgatttgcttataatgagtgttttaagttacctgctgactgcgcagttgtttgactttgtatcaggtttccggatttaaagccagtgttctgttgaaaatttaaatactatagaaggctgaaaatatgaatcctctgacagctcctcataacaattcccagggtagcagctgtttatattttcttatttttttctttctatgcacataaaagtgtgtttgtcctcataaagagtgttgactgctatagacggagcgtgcagaccacaggcgtatacctggaggcttctcccacctttgattattaacactgctcgcctttaacattatttgcttttgattgctctttttgttatacaaaaataaccaagctattagaatcttttatgatttaaaatagaacattagttttattgtatattgaaaatagttccttaaacttcataatggcttccaattatttcacacttgcttgcgttatatactattattttattgcagtatgatgtccaattatggaaacaactccagagagacatgatttttctggcttaacatgtaattgtttattgagtatttttctcattatgatttttttccttttgaattgcagttataaaggaacttgcttagattttgtaaattattatgtggttaaagaaatcaacgatttatcaagtgctcactctgtggaaggcatcgtgtgcagaatcgaagtaaaggcaaagattgaaagaaatcattcctcaaaaaagttgtgtgtattaaaatatgaagagcagtaaggttttttgttgttgttgttgttattttgagacagagtctcactctgtcactcaggctggagtgcggtggcacaatctcagctcgctgccacttccgcctcccggttcaagcgattctcctgcctcagcctcctgagtagctgggattacaggtggctgccaccaggctgggctgatttttgtattttcagtagagacggggtttcaccatgttggtcagactgatctcgaactccggacctcaggtgatccgcccacctcggcctcccaaagtgctgggattacaggagtgagccaccacacctggcgtaggattaagttttattgtcattcaaatatgaacatatttaatcttgtataataaaatataatttattctataagaaacataatgtgttgcttgctaataccaaggacattaagtgtagactagaagttcatcagagcagatggctagcaggggctgtgagactggataggggttaaccgtgaggctgaaagatgggattcgaaagtgcacctgtgtgggaaaggggagagcgcaggatcttggcgcactggacggtggctgaaggagagggagaggggggcaggccttgatgaggagttgggagggattctgtctgtgatgagaagccactggagagctttaaaccagcttttgtgaacacggggagtagcagtgttgttataagtagtgattattgtcagcatgatcgatttacattttaagagctcactcagggtgctggcggacagtggattctgtaaccattattttgttttaaatagcgtcacataagcaataatttacccatgaaccaccagttaatattgggggaatgaaaacaatggatgctgtgattctgagcttagatgatggggacaggacagagtgggagtggaagggggtgggtgtgattttcgtcctgttgagctggaggtaatggtaggacagccaggtagacaaggccctcaggcaacaaggccatttaggttaatttgtgtagctgcttcttgaagaagaaacaaatgaaggccgtattaccttctgccttcttttttgaaagcatctctgaagataaagttcaggtgattgcaggaaagtagaagtcattctgacatgcatttccgaagcatcaacttggttgtctgagagcatttcccttccaggattataattgtgagtggtaagcagcactagtgtattggtgacttactccagctgtatccaaggacaggtaaaacttcccactgtctctttctagaggctactttgtagcatttcagatgtgaaaggtgactccagcagagagctcatctatttattatttatttttgagacggagtctcactctgtcgcccaggctagaatgcaatggcgcaatctcagctcactgcggcctccacctcccaggtacaagtgattttgctgcctcagcctcctcagtagctgggattacaggagcccaccaccacacctggctatgttttgttttgtttttgtttttgtttttgtttttgttttgtagtagagatggggtttcgctgtattggccagctggtcttgaactcttgacctcaggtgatccgcccgcctcagcctccccaagtgctgggattacaggcgtgagccactgcgcccagcccagcgagctcatttctttattttattttattttattttatttatttttgtttttgagacagagtctcgctctgtcgcccaggctggagtgcagtggcgcgatctcggctcactgcaagctccgccttctgggttcacgccattgtcctgcctcagcgtccccagtagctgggactataggcacctgccaccacgcccagccaatttttttttttttttttttttagtagagatggggtttcaccatgttagcaaggatggtctcaatctcctgacctcgtgatccgcccgtctcagcctcccaaagtgctaggattacaggcatgagccaccgcgcctggcccagagagctcatttctaacaagctattatcaccatcctcactgctttctaaaccttataggtatgtagcttcaaagtttatatttgaacgtttttcctttattgatgacaaattaaggataatgaaatgaagtaatggcaagcgatgaaataatggcaaaagattttattttcctacaaagtatttattacatggatgttttatagaaaatcaatgtaaaggttgatagacttgtcctttaaaaaagatacatttcttcaaatatagggaacagcagaatgctccctgtcaccccctttgtaaaaacctctttcagctttgcagccatcatggctggggataagtagatttatttcttctgttcctaaagattattatagatgaaaatcatttggtgtggagattcttcatttacagctacgtaggatgtagcacttatcaaaatttctgcaaatcaaggagaatagtgttcatgaacctaccagtgagatattttaaaagaccgcgttctggaaaagtgaaggaggataaagaagcagtgttcttctgagggtgctaccaacatttgggactctcagaggccctgtagcccagtccccattccactccatgggtaacacctcatggttctttcatgggtgttcagcattctcttgaatgcttcccctaaaggcagtttgttctcctgtgaggcagcctagtccatttcacttgaaaattttcttctgcaatatgcattgtttggtcctggttctgtccatgatgccatttccaatcaatctgcttcctcttcagtgtgagaagcatcaggtccttgaaggtgctcacagttgtacttggggcaaggctctggaactcccttttctgcatggtccagtgaatctgcatagagccggactgggaacagtgcctcaaacaggagctccctgttgctggctttcgtgaatatgttgtttttgggggtagctcctaatctggtgaacatcaccactgcctcccaccaccgcatcctgtccaacctacatgtcggtagaggacccaccctaggaaggaatgaaggaaagaatttctaaggttgggtcttgggaagcagagacagagaaggatccgcagccttatggacagcctccctcagcagtggggcttgctgaggctctttaaccctcccagcagtgctgtagaacagctctgtgcaaacttgaatgtgcatggggcagggctgggcggcacggggaggggggtccgcgaatgtaccgtcctaacaagctcctggatgatgctagggttgctgggccgtggaccacactgggaatagtgaggctgtagcatacatcgaagtcatagtgtgagctggtagattgtttgggaccagaaagatcaaaacttacttagaaaaaaatgtcaaagtcctcttttccctgctcctcctcctctaacttaaagaattaagggctgtgtgatagccagaaagctactttcatggattcattttagcagcatctctggtgctcacgcataagctagtcagggagattgcagggggttggcagcacccaggtcccctgggccatagcaggttgtgtgaacagacttgaggagaagttttgtcttctgtcctcaggagtacaaacaggcatgtctgaatgctgacagagaagtcatcgccaaaggatagtagatattacccaaggcaaagcctgcttctcagtgaactgttgcctatgggacaagaatgatactgggaaaacagtgattgcttttaggatatttgataaagctctaaaggaatagaagagcttccacctacactacactccaagtgacagctgtgtgaacttggtggaaaacttgactgaggtcgctgagactgctggtggaaattaatcaccctcctgctctgcagtgatattggcaaaagatgagcttagggccagagtggtccacatgcctgggtgtctgtggtccctcccctgcagaacagaatgaaacagtcactgccataagatatcacagacacttctttctactagggtaacttggagcctttctttggctacctggaccctgatgagagggtaatctggaggaataggaagtgggcacagggatagtgcatggtacaggtgactcgggtgcggagagtatgtgtgtgtagggccagagctaagaaaaagcctaggataaactcgacagatggaaagtcttttttttttttaaacagggtctcactctgttttccatgctggagtgcagtggcattgattacagctcactgcagcctctacctcccaggctcaggtgttcctcccacctcagcctccacctcccaggctcaggtgttcctcccacctcaccctccacctcccaggctcaggtgttcctcccacctcagcctcctgagtagctgggactacaggcacacgccaccatgcccggataacttttgtatttttttgtagagacagggttttgccatgttgcctaggctggtctcaaactcctgggctcaagtgatccgcccactttggcctcccaaagtgctgggattacaggcgtgagccaccacacccgtccaacagatggaaattcctactttgcctcttggcatgcatacccagcctcttttctaaatgggtctcagtgattgtccaatgtgtgccccaaatcagatgaaatacaatcatcagatgcaaagcaggaaggtggtagatgacggacagtatgtaagtcggtctttgctgctagtggctttacttcatccttgagaaaatcatctttggtaaagtcataagtgttgaaactcgaaactagggtttaccctagacccacccattggccaaccttaatgggcacactgactttttaagagtgtgaaagttattagctaaatgacttgttccatggccccattatatcacagacatgttgatgtctctgttatcaaaagacgtgcaaaacaccccaaaatcgttgatgacattaacaggtaaaatgacaggggcgcgttgcaacacagaatgtgtgcttcagatggtgaccagggctggattagcctcatggttatggcccatttggggtgtggacatcagcttctcggatgaaggtgttagggttagcagagggcagcggtaggaaggaaggtgtcagatctataatgcaccccatctgtgagcctcgcggctttgccttccacacaatatttagtaatgtaaatactggaagcagggctgcctgtatctttattttattcaacttaatgtgaaaagcaggatggttagatactgggaagactatctttttaatttttttacaccaaacatctaaaattattcctattcagtgccttggtctcacccttgggaaaatttccaaaataagctaacattttccccattgtcttcccgcctaaggaatgtgtgctgtggcttttaggtcaatgatagccttgtccttcaatttcatctttactcagagtaggcgtgctgtgtggtgcaaatccatacatgtttgtttgaaaatccttttagaaccttgccttgttaggacctcctacacctgtgtcacagacacagaagtaccgtgtttaagtattgagcatacactagttttttgtgacagaatctcactctgttgccaaggctggagtgcagtgggacgatctcggctcactgcaacctccgcctcctggggtcaagtgattctcctgcctcagcctcctgagtagctgggattgcaggcgcgtgacaccacaccacctaatttttgttttttttttttagtagagacagagtttcaccatgttggccagggtggtcttgaactctggacctcaagtgatccactggccttggcctcccaaagttctgggattacaggtataagctgccacgcctggcctgcatacactggttttaagggtggctgtgcttgggctgtgtatgtgcgtagtacacagtgtcatgtgagcacttagttaacagccaggcaggggtggacaggccaggacagctaagaatcgcggaaggagtctgggggtagcaggaaggctgcactgggaatggaaagcaagcaggagatgatcttatccagaggaagcagctaataaatattgaggctggcaggaggatacaagcaaacaaacaaaaagtggggccgtgtctttaaaagctttctccgaaaccaatatttggagttttcctgtgttcttggaagtgactggagattgcatccttcataccttatttctcctgtcaggtctctacatatcacatcacaggattcagctgatattggcctaagacccttggggtcggtgcagtgggaacgtgttatagatataaatgccttaccgttgataactcagaataagatataggatatcatcattaagtctgattatctaagcttatctgtgagccttacagaaaacaaaaacgaaagatcaggaccacaggttctttgactaccatttccctatttttttcatttgtcctgaacagggcctaacacaaagataggcacatgaggcagggtagtacaaatgagtttttcccccgtatgaagtgacaatcacatggattatatgtgaccttgacattgttgagtttctaaagactttttaaggatgccatacccacccccaatagatcacaacctatttctctcattctaatgttggtcatttgattacatagtcctttgtggctctgtttgcttgagactgcaaaataaacaaaatgtttgcaagtccaggttgaccctaaaagctcttcattctgtaggccaaagccatgattcagagaacctgtggtctccacagtcaagattgtggttgatacaccccccttgaaggcagatgttttggttttaaggcatcaggaatgtgggcatgtgcatcaggattgatgtgttttggtgtggggtttaggagcaataaacttgaaacaagtttaagtacactcaactgcggtgtgttgcttttcctttaatccctagcagattaacccctatcagggttaatctgctcaactagatgatagccaaactagcttctctgataacagcagcctctaatccactggactccacacagctctcccagtgggctgctggtgttttggcagatgcaatggctattttttcctatttaggattttgcttttaataggaaccctgaaggccctcagaggtttgtgatacagacttcagcccacagctcagcctcccagatggtaattaatgtttacacaacatgacaagcacaaaatagaatctcttcgagccctgccaagcacccatcattccccctgatcttccactcttgcagtgtttgaaaattaatttgccttgaacaaacagtgggttttcctcaatttatttgtacagtttcagtgaccaagaagaagagctgcaagactgaatgtcatccttccattcgttcaagtaattgaatcttctaatggaacaaactggtctctgcttaatgatttgaagaaaagagggagaggaggaaaataaagtgaagtgtatgttagagaaagtggacatttttctgcaaaacatcactgaatgtagaattttggagatacaatcaaaacttagcagggggaatttaaagtattgctaaattaactcagtagggcggttggggttttaatacgtatatacaatgtgcagtctttgcttaaaaagagattttgtttgaggcaacagaatagacaggtgaaggtaattaaataatgaacattggccgggcgtggtggctcacgcctgtaatccccgcactttgggaggccgaggcgggtggatcacgaggtcaggagatcgagaccatcctggctaacacggtgaaaccccgtctctattaaaaatacaaaaaaaaaaatcagccaggcgtggtggcgggtgcctgtagtcccagctactggggaggctgaggcaagagaatggcgtgaacccaggaagcggagcttacagtgagccgagatcgcgccgctgcactccagcctgggcgacagagcgagactctgtctcaaaatagaataaaataaaataaaataaaataaaataataatgaacattgattgggcagggtggctcacacctataatcccagcactttgagaggcctaggcgggaggattgcttgagcctacacgttaaagaccagcctgtgcaacatggtgagacctcatttctacaaaatataaacaattaaccagcatggtggcacatgcctcagcctcccagctacttggagactaaggtgggaggatcatttgagtccggggagtcaaggctgcagtctgctgtgattgcaccactgcatcccagcctgggcaacagagtgagactgtgtccaaaaaaataaaataaaatagacattgctaccagcttgaggtaattgcatgttgattcacagaaatttgatatttccatatgtctctgggattgccagtgtttaaacatttcagtcccttattaatgttcgcactttaaagtctgggttaattttcttatttgactgtgatctgtagtctttctgtgtggtgtgctctttgtggctttgtcatttggacagtaacgagagaagctaactggaagatggaataataaaaataggacatgtctctttctaagtcataaggattagatattcaaaaagatacggatgaatggatgatgcatggatggatggatgttctaggagctagtgccccccacatagttttcttgatgcctttggaagcttcttcaggtttgctgcggtaatgaccttgtagttagtaagtcctgttaggagacttcgtaacagaatatgaagatgtgaagaccagaagtgcagaagctgtactttgggagagttggttttttgtgtatttttgtttttgttttgtattcctcctcctccttcatcaatattcaccctttcctttctgtccaaataatacccagttagaaccagttagaaattctgaagaacaggtggaaggtttaatatgcaccatgttctgatgtgtgcctgtagtcccatctcctcaggagactgagtggggaggatcacttcaccatgtgagtttgaggctgcaatgggctatgatcactccagcgtgggcgacagagcaagacccttttaactttttttttttttaaacacatgcaccatatttttaaaaattaaaactatgcaccatacacagagtcaaatatttatctgtcctcttggtgaagagatttttaaaaaatctattcaatagtccaggcatggtggctcacgcctgtaatcccagcactttgggaggccgaggcgggggtggatcacttgaggtcaggagttcgagaccagcctggccaacatggtgaaaccccatctctactaaaaacacaaaaattagctgggcatgatggcaggcccctgtaatcccagctactcggaaggttgtcagaagaatcagttgaacctgggaggtgaggcagaggctgcagtgagccaagattatgccactgcactccaccctgggcgacagagtgagactccatctcaaaaaaaaaattcagtaggtaaggcaatttaaaaagacttgaacgatcactttctcagttggcttattttaatggtagaggtgtattgtccgcgaaaagagttaattttaaaatatagcatctctttttttactttaacaataataatactcttatttactttaataaaaatttaataagtatactttactaattacagtaaataatactattatttaataactatatataattatttgctgtgtttaataacaaagtgaacattgactttaatttttatattgtgcttaactttccaaattttctataatattcatttgttttgcacttttcctcctcctcctcctcaattttgaaagttaaaagcacaatatgagaattaaagtcaatgtttatttctggatgatgggactgcaattaatgtttatctttccagtctcttttctgtgcatacttgtatacatttacacacgtagttttcactattgagatcacactgataatagtgcactttatttaatggcaattttgtcatgagatattttctgtgacattaaatacttcttcacaatagttttgggaatattgattgattacttacttattatgtgttgtgcattgtggaaagcactttacatggcctaatttatttccacaaccaccctaggaggttgttactgcatttgtgcagtaagtcattggacttttagaagtgtaggagttcatcagagtataccgaatctcaaccctaccagacccagcataataataagaaatattttatagcgcattcattttttactttctggaatgaaatagatacttaatgtacccatctacatacataatttaaaagtatatataaagccctaataaaatataaaggagaaataagtggaaaccaagtcatttataataacatacctttaagtatgtaagtgcttgtttatattagaagacaatgtttgactttatatctagaatggtatctaaatacttctactacaaatgcagactcacacaaatacatggtcatggagattcagatacctggagcagccttaccattgtgtcatgattttcccaaatagccatcaacccttgcatatgacccagatataacaaagtacagtccctgcattcctggaaaaatcagcgtatattaaaacccatgcaaagaattactttgtgtttatatacaaaaacagaggtggtgggttctagggttttcagctgcacaaatgtcgggtggaatttaggaagtgcattgagatgttgtcgtgtggggttgctgcgcacgttgcagcaaatcagacatccctaagagccaccagtgacctgcagtcatagtgatagccacacactcccacaaatttccatctcttcccatagggagtagtatcctccaatgggaactatctattacgtgactgacttagttcgcgcttttttgcactgaaaaacactttgaaaaaagcaattttgtgggggaagccatttctgaaggtttacaagccctgtaattttcttgttaggttcattcccaggtgttatggtttttgttattatgaagtggatcctttctaaacttcattttctgactgttgctggtgtatagaaaagctgaggttggttgtggtttttctttatttggatatctcattgcactctcttattagttctaatattttctcagctggttgcctctgttttccagctaggtaattatattttttgtaaacagtttttcctctttcttttgttgtataatatttgctgttggttttcaatttagttgacaggaataatttgtttcttaaaggtttggccaacattgtctgtgaaacagataccttttgggaggggaggtgaaggtttggattattgagtactttttccttttattttgatgatcctgttgggtttttaagtcaattttagcaatttatattttttcataaaatccattttattttcaaatttattacacattcacagattacattttcttatttttttatgcatatatacacacacacacaccccagttccctgtctatccagttctcactcctcccaagcccctaaacaggtagtcactgctgttactgttttcttgagtattcttccatggcttctttttttttttttttttttttttttggaaacagggtcttgctctgtcactcaggcttgagcgtaagtagtgcagtctcagctcactgcaccctccgcccaagtagctgggatcacaggcagacaccaccacacctggctaatttttgtatttttagcagagatggagtttcaccatgttggccaggctggtgttgaacttctgacctgaagtgatccacctgcctcggcctcccaaagtgctaggattacaggcgtgagccgctgcgcccagccacacggcttctttgtacgtaaaataagatgaatatatatattatttccctccattttccacaaaagatagtaaatgctctacgttgtacattcggcattcttttttacagctgcaaggtgttccattgtgtggatctgcaaacatacgtaaccagtctcctaatggttacatttaggtggcttccaaacttggtattcaaaccatggtactatttcattgtgtctgtagactaaatccttaacacaccacaccaagggaactccatttgttattttgctaaacctccacagaggttgtagagtttgcattctactagtaaagtacaaaaaaagggcccattttccccaggcaacttgtatcaaacctatatcaaaatgaaaccaatttttcctaatctcttaaagtttgtttattgaggtacaatttacatgcaataaactcaccctttttaccgtaaagtacgcaatgtaatttgaatttgcatgtattttagtataagcatgatgaactatttttataatcacaagaagagagagttttaaaccccaaaatgtaatgaatacaacatttaaataagactactcaatttgtacattcttatgtctttcaaattcagcaactttcattctttcctttatcctttggcaaattcagagtatgcagtgcaataccaagcgatttcttaaaatgtgttgctgccaattttggagaagtacagtaagacaaattgactgtcaagatggaaaagcttaactgggaagatacatttattgaataattgaaaggaagaggaaatgcattaccgattagccacaaaaatgcctgacgcctgtgcctcaagagactcttgtaaatggggagtcataaaactgtttcagcccccgaagttcttaccagctcaaactcatcactgctttgtttataggttgcagtaccagagcaacgatggactgattgctttcagggctggctgaagtgcagtgttacagccactctttgtagctttactaaccctctacactttaagtctgatgtacttaaatattttaactgaatcctggatttatcattacctgctttgctttgagacttctgctttttaggaggcagcatagtatagattggagaaaaggcagttggtgttggcagagttgggactggaactcaagccttctggtttacaaaacaaggacgtgacttccagcaagcaagttccttcacttctctgggcatattccctatctggtcagagagtgttagattagatcctgctactcaaaatgtgatcctcacatcagcagcctcagccttacctagaagatcctcagaaaggcagaatctagagccgcatcccagagctgtggaatctggatggggattctaatcagatgttcaggtgatttgaacatgcattaaagttaaaggagtgccgtacagatttgcagggttccctggagaggttggggtcttcccttcatctctggtagcttgttggaggtggtgctgacggccacagccttggcaccactcctcatgttctagctgtggttaggttgagattgagacagtgaggcaacagaggagacaagaaagtcaactccagtggcctttccggggccttgggaagcgagcccacgcctgcaggatgccatctgcaagcttggctgtgttatccaaattcttgaggctcgttcaagaacaaggaggtaaacagagtcaagctagatatctgtagtacttccttatgtgtctctgatgtgcctccttaccagcataagtaagtgtgaatgatatactccaagtggtgtcctttggaaaaggaagctgattttgggagggaatttgaatgtatacttaccaagatagaaagtatttattgatgtcttcaccagcccagtctggagaaaacagagtaatacaaaaagatttttttttttttttgagacggagtctcacactgtcgcctaggctggagtgcagtggtgtgatctcagctcactgcaacctctgcctcccaggttcacgccattctcctgcctcagcctcccgagtagctgggactacaggcacccgccaccacgcccggctaattttttgtgtttttagtagaggcagggtttcaccgtgttagccaggatggtctcgatctcctgacctcgtgatccgcccgccttggcctcccaaagtgctgggattacaggcgtgagccaccgcacccggcctacaaaaagatttttaaaaagtgtttctgccattgtaccaagcataaaaatcctgaattagctgtcagtgtgagaagagtcctgctcatgtacctagaacttctcactgggtgaaacccctcctctgttttgtgctgttaggatttctgggctgttcttactttctgtcccagacctgactcaaaggcctggatcatgcatatgaagcacgtgatttttcaatgcctttgataatagcttgctgtgggaaaatcctgtgaaagaaaaatatgggaaattttgtgaagacacatggagagacacagagctggatccctaactgtgacatctctgaataaagggccttccttcctcattggatccaggagctttgctagctggatggggacctatccgcagcaagggcttggggtgcccctttagccctgaagttaggaacaaaggttttgagaagcctttcaatttcagctttatcctaagcaaaaatcttcccagaaaggttgataagacagcactggacagaaatgtcggaagtccagagttacttttcatcagcgctttgccaagtgctcggtcttttcatacctctgaagcatgtgaagaaggcagctttcttcccatctcgctggtgttattgttccaggctgtttggagagacctgaagatagccaagttctgttagccaaaaatttgctttgtttataaacccaagttttgtttttgcttttgtgcatgttatcggtttgatctgtgttaccaaaagaacattgaaaataatgaattgctttgatgagaattccaaggaataatggcaaacaagtgtgtatatacaacagtacgtaaacagaaatatgtaagccgggcacagtgcaggcacctctaatcctggctacccaggaggctgaggcaggaggatcacttgagcccaggagttggagctgtagtgtgctgtgattacacctgtgaatatccagtacagtccagcctaaacaacctggggagaccccacctctaaaacaaaaaacagaaaaccccagaaatacatagaaccaacaagaataccacatacttttcccgtttgatacaatgaggtaagaggagaaagttaacgcccagggcagttcatttaagaatgcctgaaaaacaccttcatttcaaaggatgttgtcatctattctttttctcttttgaaattgtgtagtaataaaaggatgcatcttttcagcacaaaaatatgggaaggataattttcccccagttgtatacaaaagtacttactcccaaatggggccattcttttctattgagtgccctactggtctttcgttattctgttttgagatttttatggagtttggcttatggggtaatcaagccattctactaaatgtggcccttttgacctttggagggagatcttttgacctttggagggagtacatcttttacatccatacaggagcagctattttctatatttctttcacgattgtagaatttcacttaaatttaatatccaaggttagtctcaatgtccagcacccctttaacttggttgagtggggaaccccatgtggtcccaggggactttcttaaaagctctagcaagtgtagttgatgggaaactttatttcagttcccgtttgcacctttgatctcagaagttgctgggatcaggtgacgggcattaagagacctgccttttcacttggaagttgagcacttgctgaacaaaaaattatctgtaaatgtcaagtgtgtccctttggtcaaaatggaaagtggggaggaagggaaggccaagaaaaaacatccgtgtgatgttaaataatgtttgactcatttcaatagaaaacacttctcttttgtatgttcaacaaatgtatttgttttaaaagggaaaaatcaacttgtcaactattgtttcttaattgtgatgccataaaagactttctggagattaaggaaaacattcattttcagaatgtagtctaggctgctgttttttctcatacagagacagagtctcgctacgttgcccagggtgctcttgaactcctgggctcaagcgatccttctacctcagcctcccgagtagcttggactgtagtacacaccaccacacctggctaatttttttttttgtagagtcagggtcttgctatgttgcccaggctggtctcgaactcctgggctcaagcaatccttccaactcggcctctcaaagtgttgagattacaggtgtgagcccctatgcctggcgctaggctactttcttgaatgcagtctcctctggccagttggcctttctctcccttcccacacccccagggtcattgctccccatggtcaaaggctgttcctgcatctttctctgtccaccattgaccccatttgctgtgggcgcatacccccgcaggtggtggagacaaggacccaagccaggagggttggtgccaggtcctgttgctggagttgtgtgatagccttggagtttcctttccctccttatgccacactcgcatgtcattgcctgtggttttgtctttgctctctcccatgcagatccggagttaggtgttggcacgctaccagaacatgacagccaggatgcagggccgattgtccccaagatatcgggtctagagagaagccaggagaagagccaggactgttgcaaagagccaatctttgagcctgtggtgcttaaagacccctgccctcaggtcgcacagccaataccccagccgcagacggagccccaactccgagctccttctccggaccctgacttggtgcagcgcacagaggccccacctcaacccccacctctgagtacacagccaccacagggccctcctgaggcccagctccagcctgccccgcagcctcaggtgcagaggccacccaggccacagtcccccacccagctgctccatcagaacctcccacctgtgcaggcccacccctctgctcagagcctctcccagccattgtcagcctacaacagcagtagcttaagcctcaacagtttaaggtgagtggcctgctcttctttggcctgacttttgccctctccctggggatcaggtgggtgggagtcggggagggatccctagggagactgaggtttccttgttggaaacatcatccttttctctgagactagagacagggaatggggctgttgggtgagactcgggtctcttgggaaaggacaggttgggatgggtgggtggtgaggacattgtaaagaagtaaaatatttatgggcactcgagagtggaggcggaaggagaggaaggcttggaaagccctgggccagggagacccagcagcagtgggaggcagggagtcgaagcctggggcatatcagaggccatgcagtgtgagcagatcctttcaagagaggctctctgcctctgatggaagaagtgttaaagaaaactcgtctccctgcagctccaaaggcaggaagattgggacctgatgagtattccagcttaaggattttttttttcattctgatttacttcctcctatgtgggtcagagaagtagggaagaaacaaaacaagctgcatttagagaaagtgagaaatttctttatggaaatccaggctctctcctctgtcttgtttttgccaagttacaaagaagcgtctaaaaagcagcacagaggaacacagcaaagaaaagagaggcagaaacccagtgtgcagcgccaagtagagccgagccctggtgccccgggggctataattctaacccggcacagctcctgaggctgtgtgtctttgttactgtttttcttttgaaaacctggtggctttggtggttccgggccttgctttttcctaagaggggaaagcacagtctttggggggcaggtttcctccttccccaaggagccgggcccggcttctgccccctcggccgtttctgtggcctccagaccataaagtgatgtgagaacccaggcacctgggtttcacctcttctttgtgtgtcttcatttaagaggtaacaagacagatggggggaactcagatcatcgctttttttattcctttttgttaaccgttgctttataggagatgtagctagtggaggatggaaggctggggattttctaggggcattgatgagaatctggccacaggagcgagagaggccctgaggtttaggcagaatgagctgtctcgacaccaagatgccccacagccctgaagcagcagtttcggtttgctctgtctgcagtagcgatgggaaagtttgcaggagttgtgatttcagaaagtgtgctcgtacagggaggatctgtaaagaggaaggggcaagagagactgtggtgagggtttaggggaaggaggtaggattcttttaaagagaatacattgcttacctttttttatttttttcttttcttttttttcttgttccgatagcagcagcagaagcagcactccagcgaagactcagcccgccccacctcacatctcccaccacccctctgcctccccgttccccctctccctgcccaaccacagccccctgcacagcttcacacccaccctccagccccccgcacactcacatcaccccaatatgtttgcccctcccactgctctgcctcctccaccaccactgacatcaggaagtctgcaggtggccggacacccggccgggagcacttactcaggtaggacggaggggcctgtgctcgtgaccccgacccccaccgcccctcgctgtgacctcaccctacctatgttgtcccgattgcaaggttgcatttgcctacaattttttccttccttactgtgatcttcctcaaacgctctctggcctgaggtccagcaaaaatacctgtcagcacccatactaagctagctcagcccctgtgaatcagacactgcccgaagagagtgggtttgtttggagttaggaggcatttccagctaaattcagccactgagtggtcagacccaggtagtgtgtcccgtgtcgtctgggctcccctgagggcgatggaagcgtccccaagcccatgtctgtctcgctccaggatcttagattgtgtcctggtttaaggggtttcttttcattgggcagggcagggccttctcctgtctccttgggaggagatgacacactctttgtgacaatatatcccagaattttaagggcagatctcatgttagacacagggtccttgtctcctcacctgtgttaatcaggtcaagcgtcccagttttggtccagtgtagccatgttatgccgccaatacagagagccatatagcagtaattgacacttgaagaggacatgcgagccctgccgtgtgaacagctgacatttattagtgtgctatcactgttcccaagcacttaaacgtgcaaattgctttaaccctcaaaaatcaaacccatgagttaggcaatattattgtccccctcttggagatgggaaaactggccctcagatgggttatttgccatgcccagggtcactcagccagtggtgacagctggaaatcggactttggcatttggcctggagtttgttccccagattgatagactgcctgtccctgaaagctgggagaccagctagagaacagggagacagggtgcgaccgggccttggtctcgtctgcttcattgattgcccccgtttatctcagggcccagccacaccctgtcacccctgccactgtgtcaccagccccgtacccctccacaggaaggcagtccgatgtccttttctgaaggaaaaggcgtcatcgtctccctcttcttctcttccagagcaagacatcttgcgacaggaactgaacactcgttttttggcctctcagagtgctgaccgcggggcttccctgggccctccgccctacctgcggaccgagttccatcagcaccagcaccagcaccagcacacccaccagcacacgcaccagcacaccttcacgccgttcccccacgccatcccacccaccgccatcatgccgacgccagcacctcccatggtgcgtaccccaggcagaaatgtgaggataagtagagcacgactcttttctttatgcagcacgtgggaccgggctgggcagcggggccaccagagatcgaatggggactgacggctgttggctggagagaagggaatgtgtcctagtgccctgcctcaggcagctctgacttcaggggcctaaagtaggaacttctttctaggcagttgtatccagcactgcgggcggaaatgattccatctgccctcaaaacagtcatgtccagtgttgatggctaacttcttaaagggttgtttagttttcttgaacttcccgggggactgtcaccaggcagaaaatgcacctgcttgtgctttgcatcaagtgctagcacatacattcttgcagggtaatgggggtgaagaagagagaagagaagggagagagacctctgccaggaggctgggactgcattgggtgccacctgtgcattccgatggcttccctaaacccactttgttggaggtgttatatttcttgtgtttcataagacagtccctaatctggtattgtgctctgtcagccagtgttcagggatccccgcagggacagaacgctctgccttggggcaagaggaaccactggccatgacatggtcttgctttaactgggggctagcacatgtccagaaccagtgaggaatttttttttaagttaataacgataattcatagtgccatattagaatgctaaatattctcagatagagtcctgtctaacagtgagtattagagtcattttttacttatttaatttttaatatttcaggaaatactggattttaaggccattactataggcattgtgagaataaattgcatgattttaaaaggagtccacttcacccaactttgcttcctctccttcctctccctccccccatcttgtttaacttactttttaaaaatgtgtttttaaagtttgttttataaatttcatttcaaggaatattagcaatgaggccttgtgaccagaaatatgttcttaatagcaaatcctgtatctcttttttggatgaattatacttaacaattagattttgaagatcctaagattttgagaaagttttctgctggcctgtgtgagctgtttcacaaataaatttaaccaaaggtagttatagcatcaatatgatgacattatttagagggaacaatagtatactctttttctgttccaatgaaaggctgtctggcctaccccagatcactttgtatttgggtataatacatttcagaagacagctgcatggcaagacagtttttctgccaaagtgaagatgaaaatagggggaattcactgggtaaatcagaccaaatgctcacctctctctgatttatctggataattggctgttctctcctgtttagaggtttggttcgtgccaatctgtagaaagaaaatagtaggaagaaaggcatcctagtacgtgcagaactaaaacgtaccacttggtttttaattttgttcttccatttctgttggcttcttgtcagggagactcaggagctcagaatggtttcatatgtaatgaggttatggggtctcatgacagcttaatgacagggaagctttgtagggccacctccactgtagcagtgaacaaaaatgcagattaagtaactagcttttgctttgatccctttacagtttgacaaataccctacaaaagttgacccattctaccggcacagtgtgagtttcattaccatgctacacattgaatgtaactgctttgccatttttgtgctcttgccacagatcagtcaatgactagcagccttccttaatcatctttgcaagagttcccattgctcctcgccactttggatgcttgcttttgtggtgttttgcttttggtaaagatgcagtatcatcttctgaatcaaaagatcataagcattccaaaggcttgaaagcagagttgctctttagtggcagtcaggcatctgtcctgcaaagtgagatgtctgcaatggagtcagtagagttccaggagagtctgaaatcacagcatttcagtcgtcagttgaaatgccactaacacagaagttctggaatgcaacctgaattatttcctcttaaatagaaagtcccttgtctttttgactcatgactcttcaacaagtagattttcatttgctctagactaaatgtagaaccttcttccacatggctggtattgttctgttgagtttgttacaatagaaagtaaaaatatcacttaattaaaagaaactcccaaaattgaaatgagtgatattttctctttaaactcattctcctttatttaaaaaaaataaaaaaaacttgttttatgccattttaagagtatgttctggaacttcaattgataacaccctaagttataggttcagttaacttgtaagacaagagcttatttttattcaaagaccttgaatatttccatgatattttgatgatggggtgaatactgcatcatttttatctgaaaatttgcaagtttctttgccagtgatttcttttttttttttttttaatgaaaccagaaaaaagagaaggttaatcatgcttgtagccgtgttgattcaccatactcaactgttcttgcttaggtttgtagatagtgttatcatttgagaagtgctactttaatagatcagcaaagactgaattcattcatattctgaaccagataattagataccatgttagtcaagaggttagctgagaagtcaaggctagaaaatattagaaatcaattgaaaattatgtactctaggggcatttagaaataacgtaagatgaaagacctcttcaaaaagaagttagaaaagtgtatttgagtgatgcctcctccccctccctcccaacatggtccccgctgttctgctcagtaccagaatacaaaaacatatttcacggggacacccaaagcccagtagacctatgggtttcctctttgggtctggcccatggatgccaccattctgcccttagtctatactctgctgatttaaagtaaggaccagctaacaaaataattcaggctgggtgcagtggctcatgcctgtaatcccagcactttgggaggccgaggcaggcggatcacaaggtcaggagacggagaccatcctggctaacacggtgaaaccccgtctctactaaaaatacaaaacattagccgggcgtggtggcgggcacctgtagtcccagctactcgggaggctgaggcaggagaatggcgtgaacccgggaggcggagcttgcagtgatctgagacggctccactgcactcctgcctgggcgactgagcaagactccatttcaaaaaataataataattaatatagaaagttgagcacccaaaaagtggctcagatttactttctaggacccactgcggtgccttctgatacgcatattctacagtcctaggccaaagatggagaataagcctggaggcctgaatttttggaaggtgtatgtattattacttaggcgcttcaggtttttagtcagggggaggaatagtcagctatatttatattctaagaggtcaatgatggaataaagcaaaaagaaagtggtaagaacatccagtttttaaattgtaaacattaaagggaaaagcccacctggaggcagaatactagaaatttgagtgtgtttcactggggcatgtatttaattactcagctttattcagtgtactgtgggagagttatttcatattaggagttatagtggataatatatgaagtactcagtctcccctgctttggggattaggacattataaggggaattaagatgcaatgcactcaagtatctaaaacacaattttagacttaaaagtagttttaaatgagggcacttggcttgcaatcactgtttaagtggatttagttcaatatcaattagtctgaaaaactttgctgcatcattgaagggagcaaaatgaaataaagaccaacagaaaaaggacgtgctctgaacacgggattgcgaaatgtgaatttcagtcattaccaaaaataactaacacaaatactttattaagacgagcttcaattattgttgtaattttgacataataaaccaccacgaaggtggggcattatttaaaatatttgtatggtggcttgataaatggaaacaaaccaataggacctcaaaaagattaaatttttagaaggagggaaagttgtgtttgcattgtcttcagattctctgtatttttttcctcaattgtgtccttttataggctgttgattcaggaaaattcatagtcttcattcagaatcattcttttaccatcatagagtggactcctacgtgaagggcttggcttgagtatcctccaaagagcttgttcatttaatagcagataccattcagaagtggccataaaaactcagacttcatatgttaatacggaagtgctttgagtacctgagacttaaacaagagcaactgaaagctcgatagtgatattccagactcgggttatttctgtgcaactagaatccatcttctagacaaattggcagctccatttaaagtatacatcgagtcgttttattttaccctttcacaaatatttgtcattattttagatgagagaattaaattgtcctctggaactgccacttctgcaacaacctaatgaagcaaggattgtgaatatactctcatttcctcaaactattaaaagtctgaaagtactaattgagttttaatggtataaaatcctggcactcatgaagacttctttttcttccccctttttttttcttttttctgtctttttccccctctaattaacttgtaattttctgggcatcttatttggctcaggatccctcctgtttttgaaatgcattaaaatctccaatcatttaggacttctatctgatttaacaattaataattagaaaagctccctttctaatgatgccctcacccgggatgtcatttgctggctgattgatcctgaactacttttaactttttaagttacacattcgtggcacgtctgtgtgatcattccatcatggcttcttgactaatggcatcaaactgagattacgtggcttgctcatgtcgatgtctttctatgggacgggaatttgaatatgtcacttgcctcctactaaaatcttttttccccctctccgtctttggccacagctcttccattcctatcctcctgcagtgtcgggcatcccccctatgatcccacccactggcccttttggttcactacaaggagcatttcagccgaaggtaagaaacctcacagtgaaaacacacaggcatgtgtctaagtggcgtcccgggccaggcgtgcaggaagttctgcgtcctcttgcctgtgcagtgactcattaatcaggtcctaagtgaccactgggattagagtgagcctatttttcttttttttccaagtccatctagttttaaatggccgtgaaaatttacttttcaaactgtactacccagataatctcagttaagctaagatttcttgtgctcttcaaaatatacacaatatttatttttttactaccaatatcgtggacataacttctggtcaggaattctatgaaatatcagacacatgtgcgccaggttgttccgcaggtgtatgtaattagtaaagacacaaagctgggtccttactgattttagtagaagtggggataaaggttccacaactaaaattgtatcctatgaattctcattctccctcatttccctcgccaaccccatcggctgcaaacagggcctgccggcaggtggggtggtcgcctcccattttggtcctcctttctttctccctctctctcagccatcccacccctgccatggttacactggccaaggccaagactttgtcatcagttactaacatcctagtgtgaaattaacctttcatcctttataaaaatcaaattctgttctacctagtcagtgataatgccgtccagcgttggctacagctgtctctaaaggtcaatattgaagagtcattctcgaaacactctctttttaaatatacttacaatttctattttaccttcacacaaaaataaaaagagccgtactttcatgtgggtaaccattctcagacttgaagatattctgctgtgtgccattgggttttcgtttttcttttccccaccatctcatggctaaggtaaaacacagttttggtccagagtcttccaggataagcacataactgcatttccaaagacgtgtttcattaaaagaattaaaaggcattagaggtggggtcccctcccccttcaaaatcacctgcattgaattgcattgaattcagttcatctattgaatttgcctgcattgaattgcagcctatatgcaaggttacagatatacagggcttttatgactgcctcgttaaacacctcctgtctggagataaaatgatggtgattttaaactccttcccccagtctgcacctcactactccctcagaccctggtctgtcccctctaggttacaccaaatctctggggcctccccaaacagactggtaggtcatttaataaattagactatttccctcgctcacaattatccaatcacacagaaaactacatctgggcaagaaagtgtctctcctggtgttgaaataggcctttccaggccatcgtcctgattgaatatgtagattgcagttcattagtggagttcttcatatgtatgcaaatcaggttgttaacaactccagcttaattgttagttgtactgcagctgattgcttttctttctttcattcttttcccccccttctccttgtaggcaagcttcgggcctaaacttgagctccttttccccacgagtttaacttcctggtgtggggggtgttcatagaagttgtgatttcttccataaaatagctggtgtcgtgtcctgaatcctttcccactagaaatagtgattgtgcccaaagtaggctttttattgttgctaattcaaaggacagaagctcacagataaggttaatattagcaatatttgagaatggtggtgggaataggtaagagcaagcagaattgctttagaaatcatcaaagagcagatccgcaaggtccctaaattaggttctcttgtcccatttccaccactgctaatgagtaattactgagtataattccttattattgtctaccagttaaaacggagagcttaatgtctgtaaagtacttccagttattctgatgagaaacacctgatactgccaattataataatgttcacttaagcgtttcttggaatgtttggtgattaagcaaaaaaacagtggcagtccctgccatgggttcattcagaggaagaggagttccaggacagcatttacgtttgttgcttctcttttttggtcctgtgctttttattgcagtgaaatgttctggggacctctctctgcttttacatgccattgctggagagagcaagctgtggtcaggcccccttgagaaagagcatgtgtggtccctgagaaaaatgaatcttgcgtttcagaaggaaacaaacaaatgaagtttggcttctctcatttagcagaagggaaggatcttgctttcatgtcacctgttttgtgcttcctaagtaagctgtggtctaattaatttgtagacatccaaccctatcgatgtcgctgctcggcctgggacagtcccacacactttactccaaaaggacccgagggtacgtgcaaagtcaggcttggtctcaggtaacaccagggtgtgtgtgtttgcacgggacggccagcccagtgctcgcatcttccttagctcctttgagcgagctgctgtttcagctgttcttctagtttgtggaagaaaatgccaattactcttagaaaacacagtctctcctgctcactgcgagcataggacacaaagagaccgacttgccgatgggagaaaagaggaatgagttacggtctgagcccagaaattggacagtgtcagcttgtatagtttttacttaaccaatcttctctgtctgtatctccttaaattgtcttacacaaatgaagtagctacagaatgttttgaatggaaaagcactaaggcgcttttcttcctggaagtcaggctacacacatccccccgcttgcctggggtcaggaagttattgtactgcacggctctttggccctctatttttaatgtgctagggatccttttgtactctagagctaaataaaatatccattatgctttggttatgttgtttattcataatttattaccactgcctgcttccaaaaaaggaatctgaagttatacgatagatacaatcttgcctcattgttatttgtagtcatctttatacgaaatatgaaaaaatctttaacaatattgtctttttacctacataagggcagtcagaaattgataaccagagttagatagaagtttaaaatgactcaactatgtaagtatgtcatgatgtatagtgaacttctggaaaatgtctaatagctataaataatgtaaagtcatcaatgtaagggtattggtaaagagagcctaattctcctggatggatggaaaggacacctctccccagataccagttagtagacagctttaaaagccaggggtctgaaggccattctccctcagacctacccggtgtggtttggagctcaaaacagtgaaactcctggtgtgtgatgtgagcaaatcatgttgccagagggcacattgctattgattaaacttgtacaggggcttgtcagcgtagatgtaccaaggcttgtgaagtgggggaggggacacttggcacttttgatagtgtgaaaatgggttaattattctctaaaagggcttcatttaaaagtaaaattctaacattttaatttcccctcctaatgaagcactacaaatttgttaattagagcaattgtttgagtgacaggcatgtaaccaagttgtcattttctcttcacagttgacagatcctttcagacctatgttaagggtaagaaagcttcttatagaactgttttgcaacctctatttgactccctgtgggttaaaaatacaagtctattacaaggaaataagccatagaaatgttggaataagacattggaatgacggtgattgggtttttcagatagtgtgattgaaaatggcctaaactgttttgctttgaccgttggaggccattggctttttttttttatctctacaacagagaaaagtcaacgagtccgatctcttgttagcagttctggtaaaaggtttgactagttggaacttaaggggaaagactgaagctataggctgaagttagtctctcttgcacttagaaaatatgtagctgggtccatttattttggctggtggctccctctttctgtagtaagtgacattgacttgccatagccgtttgacctccttttaaggtgcaggaaggaggtactataagcatctggtttgttaacatcttgcttaaagcaaattgttctcgaggtctggagactggccagtgtgatgacctctaaatgaatcctggtggttgggggtaagacagacatgatgaattgttggacagaagatggatggacagcagatttcttgctatgcataactcatttctagggcacataatcagataatttgatttctccaggggaaaaaggagaattgtgtcatcacttaggtgaggcagtatattatttgtgatttcaaactacccataatttcattgcaagagaagagaactgacccagacttgcatttaagtatatattttcggaactaactccatactgtagaaaccagaagcttctgttcttcgccgatgtagaatgaggctgtgttttcttctcatctgtccagtagtcactgagcgcgcacgccgagcttatgggtagattacttagcagaaatgaagtgaaaaggtggtccctgcccgctgactggtagaagagaatacactcacagcactccactccttataaagcaagacatgaaataattggggagatgtggattcaaattcaaccccagagggtggaggatggacttgagatctgcagaggcctagatagagaacaggaaggaaggaatattcttctctttgtttctttctttaaacttaggaacagcgcccaccaacacgaatgggtagttgactcttagcatttacggtaactgggcttcaatcaaaatgtgaatttctttgtaccactttgggggttaaaataaaaaccaccacggtcttgggggaggttaggacaggttctgtaccctctcttattttgatttgactcacagacattcactaatgagctcttctgaacagctgatttgcattatagcatggcaacatttgttaagtagggcttcccactctaccaggtctgccagctggcagcagaaaagaaagagaagaggcacagagtgggattcaggcttttgccgtcttgtccttggtaaccggggaggcccttgtcaatgtggttttctgagtagcaaacccacgtggggagagagggggagctggctgtgactcccttatgactgggcgctggagagctactgatggaaggcacttggagagtacaaagcactcttgtttcacgaaaaaagcctctgcagccaaaatctgctgaaagctttggggaaattgaaggtggttttctctgaaatgtcttcctcctaaccacgttgctctttcttgttccagaaaccagggaagtggtgtgctatgcatgttcacatcgcctggcagatttaccaccaccaacagaaagtcaaggtcagtccgaccttcgtggtgtagggaagaatgggatgcacatgtgagtgtgtgacgtgctcgggagaacctgatgaaggaggcatttaaaacacattttacagacccatagttaggaaggatcaagcctctcttggaaaagctactcagaagtcttacttattttttcctagagtcagggtctcactctgttgcccaggctggagtacaaggggacaatcatagctcaccacagccttgaattcctgggctcatgtgatcctcccacctcagtctcccaagcagctgggactttaggcatataccaccatacttggctaatttcttgattgttgtttttgtagagatagataggggtctcactgtgttgcccaggctggtctcagactcctggccccaagcagttctcccacctgagcctcccaagtagctgggattacagtgcaagtcacagcagccagctcagaaatcttactgttaattagggaaaccactagtgaaattacaaaacaaaagcaaactgataatgccccagggttttgttccctttataattttgtcattttattgatccaaaggtcttgaatatggattaaatgctaaaataaagcttttggaaataaaattatagtgaccaagaattagaatacagaaaatactctgcatctgggaagagctacaaatgaatgttgggtttgggtttttgtaaaaatagtgactggtgcattcttttcattttatggctgtgggaaaatggtagagtcatgtgtgccctatatgaagatgatgccgctgaactgtcattggtcctcctgatggtcagtgccagggattggaatacagtcagtacttgcaggagccacgttctggctagttacctcgctgtccaaagacgatttttcctttttgtctatattttcatcatagggatgaacatattccatgttctgctagagcctttatgactcagtaggggagagatcaagaacttctgcaagtccctggatacagcatcagcgcttggcttagggaacaaagtaactgacaagtctgtattttacagtctgggtatttataggctatgttacgatgcctgcaaaaatgggagcaaacaagcaatcaagtaactccaataagcttcacttaatccatttcttcatgaacaagcttttagtcctaacagcatttgggagttctcatgaaagaaatacaggagaccaatgagccaggagatagatagagctcttcatcacagaagagacatgtttttaaaagggttacgtgatttttaaaataaaacaacccaagttccagtcactctagaggctgaggcaggagaaccccttgagcctgggagtttgagtccagcctgggcaacatagcaagatctcatctctaaaaaaaaaaaaagagtaaaaaataaaaacccggttaaaagttttaagatgcaaacctcagtaaatgaggtcactaagatattttgctttggttgtcagatacctgctctttcttataacatgccatcagtgagtttggctcatttgtactttattgttaggggaagtttaattggaagccttgtggtctatcttagaaaatgtgtgtgctttgaagagctaactagattttgatgattagttcaattcagtttttgttctggttgatgtggttagtggaacggtaggtaaagcacatcttccttgtaacttctttggttaaaagagatgagggatgttgcacgtgccactttagcaacttctttcccataaaagtgtccccagtgacttaaactttcattatcccaattcaattagaaagacctcttgaacatgagataacttcgttcatcttcccttttcagcaaactgcttgtaatccccaagctccattttgcttcatggccctaagttgtggttaatggaactgtgctatgtaccatgcaatattagcactaaataatttggccaccaaattaaaggaggtattcaaaagaattttatagattcatagtgaattagaagcttggttttgaggcttggctattactcgatactgggactttcattatagcattccctgtagatttgagcagaaattacatcttccctctctctgtaacgttcatttacgcattcttttagtcgttcacccagtgtttattgaaagagcctacgcctgcaggttccttactgtggcgggctgggggcatgcatccttcctggcgtctagttgcttagagttcagtaatgaggatcagttgtgtgtaaaaagtgaggaaagtgtgtgtgccctcttaatgggtggtgtcatttccagctggaggtgcacgggtagcttttgctttcagtaggggtgatgggtgagtgggacgttgccgtcagcagtaagagaacagcagacttccctgtctcagatcctcacgccatgctctgtcaatatagatgccccctcatggggctttgctgttgtacagcagggcaaggatccctcaggacatgagggagattgagctgaggctagaatggggctaaaggggctgagagcatcagatgagtccgggagatcagaagagtagccaggcacgatggctcactcctctaatccaagcactttgggaagccaaggcaagcactttgggatcgcttgagcccaggagttcaagaccagcctgggcaacatagagagagagacctgtctctaccaaaatgaaaaaacattagctgggcatggtgacatggatctgtagtcccagctactcaggagactaaggcaagaggatgcagtgaactatgattgtgccactgcatttcagtctgggcaaaagagcgagaccctatctatctcatctctttaaaaaaaaaaaaaaagagtgaaagtcagaagcaggtactaagggcagtgaaaacccaggagactgatggggaagaggtcatagcaagggaaattcaactagaagcttcaagtcccaggaccccatgccttgggagcagtgcttatccaaggcagtgtgaagccagttcaaagagaaagctgtcaagaaacaaggaggtggggcagctttgaaaccatgctggtgcaagggcctccagcctagagaaggatgccaggggaaaagattgagaggaagattaagacccaatttctactgcctaagaggatggtaggcggaaagattagcctgaggatagataaataagacaaaacagagtgatttctgtccatgataaggacttcacacaagagtttgttttttttttttggagacagcctcggtcacagcaacctccgcctcctaggttcaagcaattctcgtgcctcagcctccccagtagctgggacgacaggcgtgcaccaccacgcctggctgatcttttgtattttagtagagacagggtttcaccatgttgcccaggctgcccttcaactcctgagctcaggcagtccgcccgccttggcctcccaaagcgctgggattatggtttacttgtctggatggacactgccctcccccaaccttcctcaggtaattacaggtagtaggaagagaaagggcctctgttagttaaattaatactcctactttgtttttctttgttattgttatataacagtgatcatttgaaagttagcttatagacatgcaaatatttcttcataacttttggttactaatgtactgtgagctattagagtatggcaaagagtcattaaacaaacaattaatttatacagcagattgttcatgcagaattcctaataaaatgagctttaagacactattattttaaaccttactaaaatgggcctttacagcaaaacactgaactactttgggagtggtggcagtctccataaataggatatggttttatttctcaagccattaaccttgaagaccaaacatagctgggtgcggtggctcacacctgtaatcctagcactttgggagaccgagatgggcggatcacttgaggtcaggagtttgagaccagcctggccaacatggtgaaaccccatatcgacaaaaaatacaaaaattaactgagcattctgggaggcacctgtaatcccagctacttgggaggctgaggcaggagaagcatttgaacccaggaggtggaggttgtagtgagccgagatcccaccactgcactccagcctggaaagcagagtgagggagactccgtcacaaaaaaaaaaaaaaaaaaaaccagaccaaacactagtgttgtcactagacatttctggtgtaacaggcactaccggcctgcagatctgacatttgagggtgaaatggtttttgtgtagctgctttctctcacagtgtttgtaaacttgaacccaagtgcaccgttcacagtctccagctccagctcttcactaacacctttattccttgctgttggccttgggacccttactgttccccttgctgtgtagaaacagatgcagtcagacccacataagctggactttggactgaaacctgagttcctgagccgccctccaggccccagtctttttggagccatccaccacccccatgacctggcacggccttcaactttgttctctgccgctggtgagtgtgggtttgggtggggggacagagctgagaaatgtagttctcaggtaactaaataaatgaggtttgggctctgagctgccgctcagtcaccacctacaaaaatacagttaatgccagcttgcaaggcaacatcgcagcacatccagggagttgggaatcttcattgatacactctctttcattaaaggaggaggcagagatcatctttcccttacagggattcacattgcttcggttcattatttgcttctatattaaaccagtataactcacaagcatgtcagttgctattgagaaagatctgaaggcttgcaagggcagatcggaaggaaacaatgccaggaattatagaaggatgcggtcgcccttaatacggtgcccgcagagcactgtaattttgcaccgggatgctcagtcatgccgtgttttaaagtcctgaggataaagaaaggcgattaaggcagttgccaggagtatggtctgtgatagggaggttgggccactcggttgctggttttctctgctacaaaacgtaatactattgcctggttggttatagcggtggaagaaatttaggaaacggtgtaaacacccaagtgacctgctcatcggatctgtaattcatttaacctctgagaatacacactgtcaagtgtgcgtgtggaaggggtgaggtagagagtgacgattatgctcattcctgctccaggtacaaacaaaagacagcggctgtaaggactgtgtgtgtgctggatgagaacagccctcttggtattaagggtttcttgtcattctgtcttctctaaagcttttttaagtgtaatttctggcacacagagctcagctcagttaacacttaaaaatgatggcactgagctcattctgctaataacttcatacccactatgctaagtagaatttattcttctggacgtaagcagtcaaggggctccccatttctgatccttacgagacaagtcttacagccatcctgccagctgccaccccaggcttttatccaagactcactgttggtggacctctggctcttctgttcaggaagagagaagcacccacactgcaagaaatcatcattataatgggccttagctaccaaagcaagtgcgtccccctggagggtagatggaatttgctaaggtctcaggtttttctctgtcagtgctgtctggggacatatttgaaggctctgttaccatggcacctaggctctgagacagggctacatgaagagcaatttttggaaagaatagatttctctctggcttccatttgagccaagtggatgaattggcttcttttgcttcaataattctggaactgcaaggcacccctgggggccctgggctcagcaaagctctggtcttcattgaagcattaattagcttgcactacacagacagtatgtggccaaaattttatttagctgacaacactgctaacggcctgatgaatattctggaatatattcacttggtggaggcggggtatcatttttacacttcccaggtggaaaataagccagtatgcagggctgaatagataactcctcaggtgtcttccaattccgaactactgtgacggggatgatgttcctcctgtactgagtggcttcctctccaaacccaggccacaagacttttgcagcccagggaacagcagtccaaaacataaatcgagttaacagagtgtagacagcaacaacccctacgtttaatccattttcctaagggaatttatatttgtttataggaacttagacaaaatgcaaaggattatggaacagtttttagtaaattctttatccaggccttgtttatacttccattctagaatgtaaccttctttagcataagcagtatgggattctgcccaaaatagttatttggtgaaccttgtaactgatgtgtataacttgtacatacttaagaaatccagccattttcatcttgctattgggtgctaatcccatgaatataaactagagacttcttcagatgaccctggcaaatctctcgtctaggacaaagcctgccttccaggaagctagcctccttagctagtaagtagcctcgtattaacaagcccatttggtgccctaaggcctttagaaatgtccttccctaattcacatttgcacactctctttctctgtctccttccttccttcctttcctggcttccttcaggaacaggaatagaggcatcttcaagaagtacacattaggcaaaatacagagaagaggaggaaatgtggatcaagggacaactgaaggaaaccactaaattagacctgagttccctggcaggcaaagcaaaaacctgtcagagtcagttataagattttcagtgccccaaaacataagaatcaaccagcttttcctggcattgaaagttgagagacatcagaggacttcatctcctaaaacctaattgagctcacaataatgagttttatagagtcgggtcttatagtatccttcgatgtgggtgcatgcgaactaacatactcttcaggagaagggattctgcaagtccccagagcagcgtagccaagaaccacagcttcaggaccacccctcctgagccagagatgataacgggctgggtttctggaagtgtttctcaaagtgaaaacttggtcctccgagatgctctatgaggagtggattccatgatgaaatgttcccctcttagagaacgaaggagcctataagcttattaataagcttattaatggctctaagaagcccttcagtaaagaaacttgcttagctttttttaatccagtatttctccaaatttacttggttataaagcctcccctcctcccatgacccagggcagttatctctgtctttgtaatactgtgtgtcatcggcttaaaaaagaaatacctgtttttggtggtggccagccacgctgggaaagagaaagagggatgattgattttctgcttcctaaaaaaaaaaaaaaaaaaaaaaaaaaaaaaacacacattttcttttaccctgtgtcttgcctgcaggggcctgggtggacttcagccatgacctcccttgaacatattttctcacggggcccttaagcaagtagaagccggttgcatcttcgaagttggctttttgtaaactctggtttcgttatgtttgacttaacaggtgctgcacacccaactgggaccccttttgggccacctcctcatcacagcaacttcctcaaccctgctgcccacctaggtgagtcgcccaaaataatgggaactgagatgtgtgcttcaggcaaccctgctgtgtttaccatgctcccgctgcacctccgggcaagctggtgggagtcccagataccctgcttaccatttaggcaggagatggtgctctcttaggagtttcagtacatcccgtccagcttccagatttcatctcttacaccgcattctttcggtagtagagctgtgctcggcagtggttctgcctgaacttcccatggtgcagtgggtgagagccattccttggtatctcagggaatccgagtttacaacagcctgttcctgcccattggaagaagatggtgagctcttgccccatagcaaaggtcacctctaggaagcggaaagaaacacaagctgacgttatggagaggagttattctacatctcactgccccgataaatgagtctcttcctaataaaggtgcatgctttgtgtggcctttgtgtattcgatcccatctgcaagtgtacaggcagattcaggcattggcttgcacaacatcagggcatatcataggcacgccctcagagtttcatcatggattcagatgccacctcctttctgttctgttagaatctgcagagtgcattcctggcagaggcgagactgggcgggaaggcaagttagtacatcctagcttgagtagtgtccccactgggcaaaggaagagtaatacaaaatacacagttgtagaagaagagtcctcagaaatattttgctaacccagtgcctaaatccaagtgtaatgaaaaccttttacaccatctggtaggaaaagtgggacaggccaggtgggggcgtagagagggcagggatcccgcatcgccctgctcccaggaagctctgggttcctctcccagcagagcccctgaccatttccttcttccccatcttgtttgcagagccttttaatcggccgtctacattcacaggcctagcagcagttggtggcaatgccttcgggggacttggaaatccttccgttagtgagtacctctaacttttaaaaatctgccttggactttttatctcctgtgatccgcatatggctcaagacctttctagagaaaaggaaactatgctctggggggaccagtgtaggttatatcactgcaaaagcaggccttcacagtggggtgaggtggaagtgtgcagagccaccactgtgagggcagccccctgtggctatccagttctgaggggcaggaacggcagtgtagttgatgaccacagaaagtttactcaagtgcggagtttcatccacatcccatctctgctctccaagattttggctgcagctcacattacaagtgaaagcaatagttacagcaattgttacatttcatcttgcccgtggcattcgtggaattgaaaaaagcacaatgaaaaatagcaggaagacaccaccaggctgcgacaccaccaggcttgggataatcaagatttggcaccattttattctccatcatctaggaggactctgcagctttctactattaaaaaagcccatctcgattaggagaagaattacaaccccatctcacgttctaaacattagtgtttagtcgctgaatatgcaaattattttctttcatgctacataccatatattccgggtacaggaagagctaaaacgtgtctctgagcataccgtcacaggtcggtctttatttaaaacacaggaaggagacctgtgtgtctggtgagggcaaggtcctgtctggtctctggtgacacttgagagggccacggtgggtagaggagacagtgacttctactgtgaatcaatttagaattgttaatccaaatcccaccatcataacacacccttctgcatgcctggaacttctgcatgcaccagatacgttgaattaggtcatctcagtacccatttggtcccttttcctttttaacttcccctgtccccacctttgcttttggttttaaaaagaaaaaaaaaagctgtgagctacctctccagtgtaggacaagacttcctctaatgaatttgttaatctcctttccttttccagctcccaataatatgtattcattttaactctgaatgctgttaaaagttttttggtaagtaccttcattacagcagattatataatttctcttaaacctttttgttctccacttcaccatttcagcacccaactcaatgttcggccacaaggatggccccagtgtgcagaactttagcaaccctcacgaaccctggaaccggctgcaccgaacgcctccgtcgttcccgacccctccgccctggctgaagccaggggagctggagcgcagcgcgtccgctgcagctcatgacagagatagagatgtagataaacgagactcatctgttagtaaagatgacaaagaaaggtacggaaagaaaccgctctcgagtccccacgggggagcctgctctatgccaagtaccagtggaactggccgcccaccctccctgtcccagcctcgtgctttagccgccccggtagcctcagctcctccccacagccagtgcccgcagcccctcgcagtccccatggcccatagcatatggtgaccgtaggagatagcagagctagcgacagattcctgtctcagtcgcagttatacatcagcacgtcccaagtccctgttagcgtgtccaaacagaagtctttctctagaagacagggagttggagcttcgggccagacacacacagcatgaatcaattccatatttgctttcaagtccgtgcagtccatttaaccatccataggtttttctcgctcttttcctctttttgttttcttttagaaagccatgtttgcattgcctcatcatatttttctcaaattttgttcaaactcaaagcctggggctcacagatgactaataaaattttactcacatagatgtagagaaacgtcgacaagcagttttggtttggttttggtttcactagtggataattttgttaaccgttgtctctgcacttggtaacccatgcctaaaaaaaaaagtagcgttaaacagggaatgtcttggagttttttttccaaagaatatcgtaacgcattcttgacaaaaatgtctttttttttttctttctttaggctatttattttcactttaaatgaactgataaggaatgcacaaatatgcttgacagaaaatacctaatcccaatttccttgcagtatttaagattcaaatttgatccgaatctttaatgtttcttttctttgtataccgtgtatgtatgtgtgtgtgtatatcctagtaatttcaaagaaagaattcaactttgcaggctctaaatggggcagattagtagatactcatcagaggccatcatgctgactgataaaagaaaaacaaattttccttcaaggcagtatgataacaatctcttaaccactgggaggaatgtttatgacattcatctctgagctgtgaactgccaaaatgaggcacgcctagcaacataacctggccgaccctaggccgcgagctctctgtacacagcctgtcactaggtgcaatgcaggatgtggccaccagccctttgcgtgtttttctggatggcgtcaaaatggcctcttggattaaagtcaggaagcttaataaataaaatatactcttcttccatccttcccttaaaagttattcttcttctctgcatgtgggcaagaaacagcccttataggggagcctcctgaatactctgtggtcctctgatccttgcacaccagcaccaagccagcatggcagcctgctgctctcctcaactttgccatatctgtcttggcaccatccgtaagacctgcctggtcttagttttaactcaagttttaccttattgtcattccatttgtttttgcattttctgcccaatactcttgagcccccatccaagacaggtctctaaaattcttgtctcgtgttttcactcacagctgctctctaaaattgttttcaatgtccccatgaggtttcgtgtttagggacctgcttttcctactgccttccctccgtcttctcatcagactttggctttcttatcccatctggtgcacaagtgctctttgcaacccaaaagtcctccaactgtggcttccttttgagcctttctcacgtgctgtgtcttggagatggctctgtatccacgttctttgctctgaaactggtcacttgtccttgtaaggagcaagagacttctgtgacactgatgttgaaccctttcttccactggttcagtgttgcaaagttggaagaaaagtgatactgggcgttgggctcttaaaacgtgattctttacactagatgatcccgggagtccagacagtcgggctggattgccacatcattgccttattgaccacatgcagccatcttggctttctggaagctcttcttctgtgctcttggttgaggctcttaacatgcagagagattcttgctcccagcagactccccctcaccctcatccctggtccatctcccccattaagcttcctctaaaatctaggtaagtaggataagggtggctggctctgccctgtccagggcacggctgctgccttggcgaccatgggaagcagcccccagcctgtcctcttcacaccaccatttcacccgcagcccctggcccggccgactcgcccctttcatttcatctgcgtccttgtcttcccctctctcccccagggaaagcgtcgagaagagacactccagccacccttcaccagcacctgtcctcccggtgaatgccctgggacatacccgcagctccactgaacagatccgggctcatctgaacactgaggctcgggagaaggacaaacccaaagagagggagagagaccactcggaatcccgcaaggacctggccgccgacgagcacaaggcgaaagagggccacctgcccgagaaggacgggcacggccacgaggggcgcgccgcgggcgaagaggccaagcagctggcccgggtgccgtctccctacgtgcggaccccggtggtggagagtgccaggcccaacagcacctcgagccgggaggccgagccgcgcaagggtgagccggcctacgagaaccccaagaagagctccgaggtcaaggtgaaggaggagcggaaggaagaccatgacctgcctccagaggccccgcagacccaccgggcctcggagccgccgcctcccaactcctcgtccagcgtgcacccggggcccctggcctcgatgcccatgacggtgggggtgacgggcattcaccccatgaacagcatcagcagcctggacaggactcgcatgatgacccccttcatgggcatcagccccctcccgggcggagagcgcttcccgtacccttctttccactgggaccccatccgggaccccttgagggatccttaccgagaacttgacattcaccggagagacccgctgggcagggacttcctgctaaggaacgacccgctccaccggctctcgactccccggctgtacgaagccgaccgctccttcagggaccgggagcctcacgactacagccaccaccaccaccaccaccaccacccgctgtctgtggaccctcggcgggagcacgagcggggaggccacctggacgagcgggagcgcttgcacatgctcagagaagactacgagcacacgcggctccactccgtgcaccccgcctccctcgacggacacctcccccaccccagcctcatcaccccgggactccccagcatgcactatccccgcatcagccccaccgcgggcaaccagaacggactcctcaacaagacccctccgacagcagcgctgagcgcacctcccccgctcatctccacgctggggggccgcccggtctctcccagaaggacgactcctctgtccgcagagataagggagaggcccccttcccacacgctgaaggatatcgaggcccgataagccgagaacaggagcaagaacgaggaagaagaaaccctaggcagacaccaggccaggcttgagagacagaactcctgcatggctcacacagactgggggggaaagccccaccccttccccttgtaaaaaatgtatagactcagtgcacattttgaaatgttttgtatattatatgttgagatttttcagatcttttagcccagtcatatgttctcacgtctcctactttttgtttctcgtataaaactttttgatttgaaccaaaacagtgaagatgacaacacacaccaattggatgataattgtagcgggggcggtgggggggagaagtccacgccatccatcatgcaaaattctttcagatgaggtgggaaggccgtgtacatagttatgtaaaaagagattgcttcatgagctaatggttcatatatgcaaaagggtaagatgaaagctttactttgtacaaatgtaaatagataaagtaacataatacattaatacttcttaaaatgtgctatttgcaaacttacttaatatcagtgaacacagtcggctaaagctgtgttcccatatattgttatagacagctaaacccttcaactatgcaatgaatgttcgggcttttcacaaaagcccgcctaactcaaaggagccttttcaaatccatttacagcatacttaaggtcatattttccctgaacaagcgcttacgtgatatgactctgttttccttgcttgttttttttcaaacggagaaacatcctgttttgcaaattggaccccaggctggaacttagcatctgaagttgccgcttgtgggctctgggggaaagtgtagccccggagaggtaactgaggacatgagcaaccagtgccagggagggtgggatttgccagatgccaaaatcaggggacgggtggtggtgtctgtcagacacacacaggtcgccagtgacttcacacacacctcatgtgagaaccatgccttttttagtgtgtcctatttcatacctgtacacacttcctcgttttgtaatgagatttacttacacccaaacagatcctgaaagaaagcttcaagttttctcagatgatggatatgttttcactgtattcaataactgacggatgtaaggtgcacgtttcctgatgtgacgcactgtattccagctggtgatcaagtctgggaacagccgtaacaggtcaaccttgtggagccatcgcgagttagagggtgaaagatggcagaaaaaaaagtcttgtgtgtgagtgtgttttttgagtttgcatcaatcttaatgtctcttcataatacttttataatacattaagcctcttgtctacatatttggagagaatatgactttactagcagagaaatacaatatatcttgtctactggactgtaaaatatatgtatgaaataaaattagttccatttggtcttctagtatattaaagtgctatctgacgttgttatcctgtttttgcaaaaaaaaaaaaaaaaaaaagttaactacagaccattgtttctaataagcagagagatctattttagtagtaaactgaaggtttagttgtgagcttcagattttgtgaactccagatgttgtgcggtgtttttttttttttttaagacaacaactaaaaaaaatgcaaggaatatgtacactggaactgtagtggtagctttcagtattgtaaagagattgttctatacggacctttttgctgtttatcctgtatgtaataaagtcctttctagatcctatgtgaaaagaaaagtgaagcaactgaatcttcagcatgttctcatcggcggagccttcttgtgtaatgtaaactgtgccatgttattaaaaaatgtgaactaagcttccagctgcttgtttgtgtgaggtgaccatcattaccttagggaagaagccatacctgtacaagaccgggctcttgaaaagaaacacctcgaacccagcccgtgtaagaacagaaggctcacctgcagtggctgaccaccctacccaactcggttagtgtctcaccaatttgttactataaacatttgcaccccacacagtcgcttgtggtttgttttttgaggagggggggttctgttagtttttcgtatgtccaagatactgtaaaaggtacttctggattttgtagacgtgtgtacagtgtgggccacgttagccagttgtttgtgcctggctacttcaaaactcagcgaaagtgtttgcttttccagcagtgatgagaattctgacctagggcctgtgacaacagtttttgcttgctcgttgtattgcatttcaatctgtggactcggtcagtcatatgttacttaagaccttccagatttttttttcctgtcttagctttttctctcttttaattacgtggtgtagtcctcatcagtttgcagtctccctgtcctctaaaatctgttttgtttttttccatgatgttaaaaaaacaaaaaaatgttaaattttcttataccgacctgatgaaattgctatttggatgagattatttgcatgggtgtttgtatgttactagggaaaaagtaaaagcagttcaagttagcaagatctgggtagctgctgaatgggaatcagaatagaaatgttcagaaattagcgggggggcagatctgtggttggcgagtgctgtggactcccgtggtttcacaggggcatctgagaagtgcatccaaggcactggaaaagtcagtccagggcgagaaaagggcactgagaagtcggtccggttgcagacatccgctaatctgggcagagcagtgacttcttgaataaaagcccatttcacacagccctgttttcctacgttaataactgactccaaactggaaaaaataaggaagaaaaacccagtggattggaaaacacgataaacactgtgtttttccacatcaggcacttctcaggcccctgcagacagtagcagtggcgccttgctttgctatttttcactgctccaattgtacacctattttgacgtcgccatctgcaatgtcagaacgtaggagagtcaagctctcaaatcagccacggtatctaatccccagggcttcattcatctcaccctttgcatattttccccctaattacgctcagctcctcggcactgatgggtaccagcaccaatttgatttcctgctaacctatagatgctctaattatctcccccatctttgactgacaatgatcttgttaccttctaatggtacatgacaggtaaaatagcgaatataatgatgcaataattaaccactttggatggatatttgccacggcatttgctgtttatccatttttctgcctcaatcaaggtagatgaggggaaataagacgcaattgttgacattctttacatacgt
